(19) United States
(12) Patent Application Publication
(10) Pub. No.: US 2026/0167720 A1
(43) Pub. Date: Jun. 18, 2026

(54) MULTICHAIN MULTITARGETING BISPECIFIC ANTIGEN-BINDING MOLECULES OF INCREASED SELECTIVITY

(71) Applicant: AMGEN RESEARCH (MUNICH) GMBH, Munich (DE)

(72) Inventors: Stephanie Everts, Munich (DE); Markus Muenz, Munich (DE); Johannes Brozy, Munich (DE)

(21) Appl. No.: 18/862,282

(22) PCT Filed: May 12, 2023
(86) PCT No.: PCT/EP2023/062750

§ 371 Date: Nov. 1, 2024

Related U.S. Application Data
(60) Provisional application No. 63/341,409, filed on May 12, 2022.

(51) Int. Cl. C07K 16/28; A61K 38/00; A61P 35/02

(52) U.S. Cl. CPC C07K 16/2809; A61K 38/00; A61P 35/02; C07K 2317/21; C07K 2317/31; C07K 2317/522; C07K 2317/524; C07K 2317/526; C07K 2317/53; C07K 2317/55; C07K 2317/565; C07K 2317/622

(57) ABSTRACT

The present invention provides multichain multitargeting bispecific antigen-binding molecules characterized by comprising a first and a second bispecific entity each comprising a domain binding to a target, a second domain binding to an extracellular epitope of the human and the Macaca CD3ε chain, wherein both bispecific entities are linked to each other by a spacer which spaces apart the first and the second bispecific entity. Moreover, the invention provides a polynucleotide, encoding the multitargeting bispecific antigen-binding molecule, a vector comprising this polynucleotide, host cells, expressing the construct and a pharmaceutical composition comprising the same.

### TECHNICAL FIELD

[0001] This invention relates to products and methods of biotechnology, in particular to multichain multitargeting antigen-binding molecules, their preparation and their use.

### BACKGROUND

[0002] Redirecting T cell activity against tumor cells by means of bispecific molecules independent of T cell receptor specificity is a further evolving approach in immunooncology (Frankel S R, Baeuerle P A. Targeting T cells to tumor cells using bispecific antibodies. Curr Opin Chem Biol 2013; 17:385-92). Such new protein-based pharmaceuticals typically can simultaneously bind to two different types of antigen. They are known in several structural formats, and current applications have been explored for cancer immunotherapy and drug delivery (Fan, Gaowei; Wang, Zujian; Hao, Mingju; Li, Jinming (2015). “Bispecific antibodies and their applications”. Journal of Hematology & Oncology. 8:130).

[0003] Bispecific molecules useful in immunooncology can be antigen-binding polypeptides such as antibodies, e.g. IgG-like, i.e. full-length bispecific antibodies, or non-IgG-like bispecific antibodies, which are not full-length antigen-binding molecules. Full length bispecific antibodies typically retain the traditional monoclonal antibody (mAb) structure of two Fab arms and one Fc region, except the two Fab sites bind different antigens. Non-full-length bispecific antibodies can lack an Fc region entirely. These include chemically linked Fabs, consisting of only the Fab regions, and various types of bivalent and trivalent single-chain variable fragments (scFvs). There are also fusion proteins mimicking the variable domains of two antibodies. An example of such a format is the bi-specific T-cell engager (BiTE®) (Yang, Fa; Wen, Weihong; Qin, Weijun (2016). “Bispecific Antibodies as a Development Platform for New Concepts and Treatment Strategies”. International Journal of Molecular Sciences. 18 (1): 48).

[0004] Exemplary bispecific antibody-derived molecules such as BiTE® molecules are recombinant protein constructs made from two flexibly linked antibody derived binding domains. One binding domain of BiTE® antigen-binding molecules is specific for a selected tumor-associated surface antigen on target cells; the second binding domain is specific for CD3, a subunit of the T cell receptor complex on T cells. By their particular design, BiTE® antigen-binding molecules are uniquely suited to transiently connect T cells with target cells and, at the same time, potently activate the inherent cytolytic potential of T cells against target cells. An important further development of the first generation of BiTE® antigen-binding molecules (see WO 99/54440 and WO 2005/040220) developed into the clinic as AMG 103 and AMG 110 was the provision of bispecific antigen-binding molecules binding to a context independent epitope at the N-terminus of the CD3c chain (WO 2008/119567). BiTE® antigen-binding molecules binding to this elected epitope do not only show cross-species specificity for the human and the Macaca,or Callithrix jacchus, Saguinus oedipus or Saimiri sciureus CD3ε chain, but also, due to recognizing this specific epitope (instead of previously described epitopes of CD3 binders in bispecific T cell engaging molecules), do not demonstrate unspecific activation of T cells to the same degree as observed for the previous generation of T cell engaging antibodies. This reduction in T cell activation was connected with less or reduced T cell redistribution in patients, the latter being identified as a risk for side effects, e.g. in pasotuximab.

[0005] Antibody-based molecules as described in WO 2008/119567 are characterized by rapid clearance from the body; thus, while they are able to reach most parts of the body rapidly, their in vivo applications may be limited by their brief persistence in vivo. On the other hand, their concentration in the body can be adapted and fine-tuned at short notice. Prolonged administration by continuous intravenous infusion is used to achieve therapeutic effects because of the short in vivo half-life of this small, single chain molecule. However, bispecific antigen-binding molecules are available which have more favorable pharmacokinetic properties, including a longer half-life as described in WO 2017/134140. An increased half-life is typically useful in in vivo applications of immunoglobulins, especially with respect to antibody fragments or constructs of small size, e.g. in the interest of patient compliance.

[0006] One challenging ongoing problem in antibody-based immunooncology is tumor escape. Such tumor escape happens when the immune system—even if triggered or directed by some antibody-based immune-therapeutics—is not capable enough to eradicate tumors, which carry accumulated genetic and epigenetic alterations and use several mechanisms to be the victorious of the immunoediting process (Keshavarz-Fathi, Mahsa; Rezaei, Nima (2019) “Vaccines for Cancer Immunotherapy”). Generally, four mechanisms interfering with effective antitumor immune responses are known: (1) defective tumor antigen processing or presentation, (2) lack of activating mechanisms, (3) inhibitory mechanisms and immunosuppressive state, and (4) resistant tumor cells. Especially with respect to the first mechanism, tumor antigens might be present in a new form due to the genetic instability, mutation of the tumor and escape from immune system. Epitope-negative tumor cells remain hidden and consequently resistant to the immune rejection. They have been developed following the elimination of epitope-positive tumor cells, similar to Darwin's theory of natural selection. In consequence, antibody-based immune-therapy directed against an antigen on tumor cells is rendered ineffective when such tumor cells no longer express a respective antigen due to tumor escape. Said antigen loss is understood herein as driving force for tumor escape and thus, used interchangeably. Accordingly, there is a need to provide improved antibody-based immunooncology which addresses the problem of antigen loss to effectively prevent tumor escape.

[0007] A probably even more pressing challenge to the broad utilization of immunooncology with respect to T-cell engaging bispecific molecules is the availability of suitable targets (Bacac et al., Clin Cancer Res; 22(13) Jul. 1, 2016). For example, solid tumor targets may be overexpressed on tumor cells but expressed at lower, yet significant levels on nonmalignant primary cells in critical tissues. In nature, according to Bacac et al, T cells can distinguish between high- and low-antigen expressing cells by means of relatively low-affinity T cell receptors (TCRs) that can still achieve high-avidity binding to target cells expressing sufficiently high levels of target antigen. T-cell engaging bispecific molecules that could facilitate the same, and thus maximize the window between killing of high- and low-target expressing cells, are thus highly desirable. One approach discussed in the art is the use of dual targeting of two antigens which may lead to improved target selectivity over normal tissues that express only one or low levels of both target antigens. This effect is thought to be dependent on the avidity component mediated by the concurrent binding of the bsAb to both antigens on the same cell. With respect to dual targeting as such, some multispecific monoclonal antibodies (mAb) or other immune constructs are known in the art. WO 2014/116846 teaches a multispecific binding protein comprising a first binding site that specifically binds to a target cell antigen, a second binding site that specifically binds to a cell surface receptor on an immune cell, and a third binding site that specifically binds to cell surface modulator on the immune cell. US 2017/0022274 discloses a trivalent T-cell redirecting complex comprising a bispecific antibody, wherein the bispecific antibody has two binding sites against a tumor-associated antigen (TAA) and one binding site against a T-cell.

[0008] However, dual targeting alone as in molecules described above may not be sufficient for efficient target selectivity (Mazor et al, mAbs 7:3, 461-469; May/June 2015). Especially the configuration of the bsAb binding domains, namely monovalent vs. bivalent, is a critical factor. Even more, the provision of a bispecific molecule with several valences alone may not lead to clinically suitable therapeutic as also the potential risk profile in terms of significant immunological side effects such as cytokine release syndrome (CRS) has to be considered. Hence, despite the so-far achieved pre-clinical and clinical success of antibody-based immune-therapeutics, notable limitations remain including differential responses between individuals and cancer types. Not all patients will respond to therapy at available safe doses as dose-limiting toxicity can be a limiting factor for the efficacy of antibody-based immune-therapeutics. Hence, there is also a need to reduce dose-limiting toxicity in antibody-based immune-therapeutics to make such therapy available to more patients suffering from diverse proliferative diseases.

[0009] While different multispecific antibodies or antibody fragments are known in the art, some of which address T-cells, no multitargeting bispecific molecules have been proposed before which both addresses the need of overcoming dose-limiting toxicity in T cell redirecting immune-therapeutics by increasing the therapeutic window and are a stable and ready-to-use therapeutic system.

### SUMMARY

[0010] In view of the various unmet needs described above, it is an object of the present invention to provide a molecule which comprises at least two polypeptide chains, i.e. a multichain molecule, which molecule is preferably an antigen-binding molecule. The molecule of the present invention is further preferably bispecific, such as a T cell engaging molecule. Further, the molecule of the present invention is preferably multitargeting, e.g. it is typically capable to immune-specifically bind to at least two antigens on a target cell which are typically associated with one or more diseases. It is further preferred that a molecule of the present invention is typically capable to immuno-specifically bind to two antigens on an effector cell at the same time, preferably for use in the treatment of said one or more diseases. Accordingly, the present invention provides a preferably multitargeting bispecific antigen-binding molecule comprising at least one polypeptide, wherein the molecule is characterized by comprising at least five distinctive structural entities, i.e. (i.) a first domain binding to a target cell surface antigen (e.g. a first tumor associated antigen, TAA), (ii.) a second domain binding to an extracellular epitope of the human (and preferably non-human primate, e.g. Macaca) CD3 chain, wherein the first binding domain and the second binding domain together form a first bispecific entity, (iii.) a spacer which connects but also sufficiently spaces apart the first bispecific entity from a second bispecific entity comprising (iv.) a third domain binding to the same or preferably a different target cell surface antigen (e.g. a second TAA), and (v.) a fourth domain binding to an extracellular epitope of the human (and preferably non-human primate, e.g. Macaca) CD3 chain. Preferably, the domains are (i.) scFv domains comprised of VH and VL domains in amino to carboxyl orientation, respectively, wherein a flexible but short peptide linker links the VL of the first domain to the VH of the second domain and the VL of the third domain to the VH of the fourth domain, respectively, and/or (ii.) Fab domains comprising a first polypeptide monomer comprising a VL and CL domain, and a second polypeptide monomer comprising a VH and CH domain. Surprisingly, a multichain multitargeting bispecific antigen-binding molecule as described herein is typically capable to enable T-cells to distinguish between killing of cells expressing only one or both targets typically associated with a particular disease, respectively, thus opening a therapeutic window and reducing the risk for off-target toxicities and side effects. Moreover, the invention provides a polynucleotide encoding the multitargeting bispecific antigen-binding molecule, a vector comprising this polynucleotide, and host cells expressing the construct and a pharmaceutical composition comprising the same.

[0011] In a first aspect, it is envisaged in the context of the present invention to provide a multichain multitargeting bispecific molecule comprising at least two polypeptide chains, wherein the molecule comprises
[0012] (i.) a first binding domain which binds to a first target cell surface antigen (TAA1),
[0013] (ii.) a second binding domain which binds to an extracellular epitope of the human and/or the Macaca CD3 chain,
[0014] (iii.) a third binding domain which binds to a second target cell surface antigen (TAA2), and
[0015] (iv.) a fourth binding domain which binds to an extracellular epitope of the human and/or the Macaca CD3 chain,
[0016] wherein the first binding domain and the second binding domain form a first bispecific entity, and the third and the fourth binding domain form a second bispecific entity, and
[0017] wherein the molecule further comprises a spacer entity selected from
[0018] (1.) a dimerizing domain selected from
   [0019] (a.) an Fc domain comprising a first and a second polypeptide monomer comprising a hinge, a CH2 domain and a CH3 domain, respectively, wherein the first and second polypeptide monomer form a heterodimer; wherein the heterodimer is formed by
   [0020] charged pair mutations selected from (i.) D399K, K409D, K392D, and E356K, (ii.) D399K, K409D, K392D, E357K, K370D, and E356K, (iii.) D399K, K409D, K392D, E356K and K439D, (iv.) D399K, K409D, and K392D, (v.) D399K, K409D, K392D, E357K and E370K, (vi.) D399K, K409D, K392D, E357K, K370E and K360E, (vii.) D399K, K409D, K392D, E357K, K370E, E356K, and K439E, and (viii.) D399K, K409D, K392D, E357K, K370E, K360E, E356K, and K439D, preferably comprising a K392D, K409D and/or K439D mutation in the CH3 domain of the first polypeptide monomer and comprising a E356K and/or D399K mutation in the CH3 domain of the second polypeptide monomer, wherein the positions are according to EU numbering; or
   [0021] knobs-into-holes mutations comprising preferably a T366S, L368A and Y407V mutation in the first polypeptide monomer and a T366W mutation in the second monomer, wherein the positions are according to EU numbering;
   [0022] (b.) a human serum albumin (HSA) domain comprising a first and a second polypeptide monomer, wherein the first and the second polypeptide monomer correspond to an HSA subdomain, respectively, wherein the first and second polypeptide monomer form a native HSA-like heterodimer; and
   [0023] (c.) a Fab comprising a first and a second polypeptide monomer, wherein the first polypeptide monomer comprises a VL and CL domain and the second polypeptide monomer comprises a VH and CH1 domain, wherein the CL and CH1 domains are linked by a disulfide bridge;
   [0024] wherein the dimerizing domain comprises two N-termini and two C-termini, respectively, whereof at least one N-terminus and one C-terminus, respectively, is linked to a bispecific entity, wherein any of the first, second, third and fourth domain can be selected from any form of binding domain, preferably selected from Fab and single chain domain, the single chain domain preferably selected from single chain Fv (scFv) and scFab;
[0025] (2.) a single chain domain selected from ubiquitin, beta 2 microglobulin,, VH-only domain, PSI domain from Met-receptor, Fibronectin type III domain from tenascin, Granulocyte-macrophage colony-stimulating factor (GM-CSF), interleukin-4, CD137L Ectodomain, Interleukin-2, PD-1 binding domain from human Programmed cell death 1 ligand 1 (PDL1), Tim-3 (AS 24-130), MiniSOG, a programmed cell death protein 1 (PDT) domain, human serum albumin (HSA), or a single chain Fc (scFc) domain comprising two polypeptide monomers comprising each a hinge, a CH2 and a CH3 domain a hinge and a further CH2 and a CH3 domain, wherein said two polypeptide monomers are fused to each other via a peptide linker,
[0026] wherein the single chain domain comprises one N-terminus and one C-terminus, which are, respectively, linked to a bispecific entity, wherein at least one of the first, second, third and fourth binding domain is a two-chained Fab, and any of the remaining up to at least three binding domains can be selected from any form of binding domain, is preferably selected from Fab and single chain domain, the single chain domain preferably selected from scFv and, scFab;
   wherein the distance between the C alpha atoms of the first amino acid located at the N-terminus and the last amino acid at the C-terminus of the spacer entity are spaced apart by at least 30 Å, wherein the spacer entity spaces apart the first and the second bispecific entity by at least a distance of about 50 Å, wherein the indicated distance is preferably understood as the distance between centers of mass (i.) of the first and the third binding domain or (ii.) the first and the second bispecific entity, and which spacer entity is positioned between the first and the second bispecific entity.

[0027] Within said aspect, it is also envisaged in the context of the present invention to provide a multichain multitargeting bispecific antigen-binding molecule, wherein when the spacer is a single chain domain, the arrangement of the binding domains in an amino to carboxyl order is selected from the group consisting of
[0028] (i.) first and second domain, spacer, third and fourth domain
[0029] (ii.) first and second domain, spacer, fourth and third domain
[0030] (iii.) second and the first domain, spacer, third and fourth domain, and
[0031] (iv.) second and first domain, spacer, fourth and third domain.

[0032] Within said aspect, it is also envisaged in the context of the present invention to provide a multichain multitargeting bispecific antigen-binding molecule, wherein when the spacer is a single chain domain, the arrangement of the binding domains in an amino to carboxyl order is selected from the group consisting of
[0033] (i.) first domain in the format of Fab, second domain in the format of scFv, spacer, third domain in the format of Fab and fourth domain in the format of scFv (e.g. FIG. 3B);
[0034] (ii.) first domain in the format of Fab, second domain in the format of Fab, spacer, third domain in the format of Fab and fourth domain in the format of Fab (e.g. FIG. 3D);
[0035] (iii.) first domain in the format of scFv, second domain in the format of Fab, spacer, third in the format of scFv and fourth domain in the format of Fab (e.g. FIG. 3H);
[0036] (iv.) first domain in the format of scFv, second domain in the format of scFv, spacer, third in the format of scFv and fourth domain in the format of Fab;
[0037] (v.) first domain in the format of scFv, second domain in the format of scFv, spacer, third in the format of Fab and fourth domain in the format of scFv;
[0038] (vi.) first domain in the format of Fab, second domain in the format of scFv, spacer, third in the format of scFv and fourth domain in the format of scFv; and
[0039] (vii.) first domain in the format of scFv, second domain in the format of Fab, spacer, third in the format of scFv and fourth domain in the format of scFv,
[0040] wherein each scFv comprises in an amino to carboxyl order VH, linker and VL or VL, linker and VH, preferably VH, linker and VL.

[0041] Within said aspect, it is also envisaged in the context of the present invention to provide a multichain multitargeting bispecific antigen-binding molecule, wherein when the spacer is the spacer is a dimerizing domain, the arrangement of the binding domains in an amino to carboxyl order is selected from the group consisting of
[0042] (i.) a first chain comprising the VL and CL of the first domain, a second chain comprising the VH and CH1 of the first domain, forming a Fab together with the first chain, second domain in the format of scFv, first polypeptide monomer of the spacer dimerizing domain, and a third chain comprising the second polypeptide monomer of the spacer dimerizing domain, the third domain comprising the VH and CH1 of the third domain, forming a Fab together with the VL and CL of the third domain on the fourth chain, and a fourth chain comprising the VL and CL of the third domain, and the fourth domain in the format of a scFv (e.g. FIG. 3A);
[0043] (ii.) first domain in the format of Fab, second domain in the format of Fab, spacer, third domain in the format of Fab and fourth domain in the format of Fab (e.g. FIG. 3C);
[0044] (iii.) a first chain comprising the second domain in the format of scFv, the VH and CH1 of the first domain, forming a Fab together with the second chain, first polypeptide monomer of the spacer dimerizing domain, a second chain comprising the VL and CL of the first domain, a third chain comprising the second polypeptide monomer of the spacer dimerizing domain, the third domain comprising the VH and CH1 of the third domain, forming a Fab together with the VL and CL of the third domain on the fourth chain, and a fourth chain comprising the VL and CL of the third domain, and the fourth domain in the format of a scFv (e.g. FIG. 3E);
[0045] (iv.) a first chain comprising the second domain in the format of scFv, the VH and CH1 of the first domain, forming a Fab together with the second chain, first polypeptide monomer of the spacer dimerizing domain, a second chain comprising the VL and CL of the first domain, a third chain comprising the second polypeptide monomer of the spacer dimerizing domain, the fourth domain in the format of a scFv, the third domain comprising the VH and CH1 of the third domain, forming a Fab together with the VL and CL of the third domain on the fourth chain, and a fourth chain comprising the VL and CL of the third domain (e.g. FIG. 3F);
[0046] (v.) a first chain comprising the second domain in the format of scFv, the VH and CH1 of the first domain, forming a Fab together with the second chain, first polypeptide monomer of the spacer dimerizing domain, a second chain comprising the VL and CL of the first domain, a third chain comprising the second polypeptide monomer of the spacer dimerizing domain, the fourth domain in the format of a scFv, the third domain comprising the VH and CH1 of the third domain, forming a Fab together with the VL and CL of the third domain on the fourth chain, and a fourth chain comprising the VL and CL of the third domain (e.g. FIG. 3G);
[0047] wherein each scFv comprises in an amino to carboxyl order VH, linker and VL or VL, linker and VH, preferably VH, linker and VL.

[0048] Within said aspect, it is also envisaged in the context of the present invention to provide an antigen-binding molecule, wherein when the spacer is a dimerizing domain, the arrangement of the binding domains is in an amino to carboxyl order and is selected from the group consisting of
[0049] (i.) a first chain comprising the first domain in the format of scFv, first polypeptide monomer of the spacer dimerizing domain, third domain in the format of scFv and a second chain comprising the second domain in the format of scFv, second polypeptide monomer of the spacer dimerizing domain, fourth domain in the format of scFv (e.g. FIG. 2A);
[0050] (ii.) a first chain comprising the first domain in the format of scFv, first polypeptide monomer of the spacer dimerizing domain, second domain in the format of scFv and a second chain comprising the third domain in the format of scFv, second polypeptide monomer of the spacer dimerizing domain, fourth domain in the format of scFv (e.g. FIG. 2B);
[0051] (iii.) a first chain comprising the VL and CL of the first domain, a second chain comprising the VH and CH1 of the first domain, forming a Fab together with the first chain, first polypeptide monomer of the spacer dimerizing domain, third domain in the format of scFv, and a third chain comprising the second domain in the format of scFv, second polypeptide monomer of the spacer dimerizing domain, fourth domain in the format of scFv (e.g. FIG. 2C);
[0052] (iv.) a first chain comprising the VL and CL of the first domain, a second chain comprising the VH and CH1 of the first domain, forming a Fab together with the first chain, first polypeptide monomer of the spacer dimerizing domain, second domain in the format of scFv, and a third chain comprising the fourth domain in the format of scFv, second polypeptide monomer of the spacer dimerizing domain, third domain in the format of scFv (e.g. FIG. 2D);
[0053] (v.) a first chain comprising the VL and CL of the first domain, a second chain comprising the VH and CH1 of the first domain, forming a Fab together with the first chain, first polypeptide monomer of the spacer dimerizing domain, and a third chain comprising the second domain in the format of scFv, second polypeptide monomer of the spacer dimerizing domain, third domain in the format of scFv, and fourth domain in the format of scFv (e.g. FIG. 2E);
[0054] (vi.) a first chain comprising the VL and CL of the first domain, a second chain comprising the VH and CH1 of the first domain, forming a Fab together with the first chain, first polypeptide monomer of the spacer dimerizing domain, third domain in the format of scFv, and fourth domain in the format of scFv, and a third chain comprising the second domain in the format of scFv, second polypeptide monomer of the spacer dimerizing domain (e.g. FIG. 2F);
[0055] (vii.) a first chain comprising the VL and CL of the first domain, a second chain comprising the VH and CH1 of the first domain, forming a Fab together with the first chain, first polypeptide monomer of the spacer dimerizing domain, VH and CH1 of the third domain forming a Fab together with the third chain, a third chain comprising the VL and CL of the third domain, a forth chain comprising the VH and CH1 of the second domain, forming a Fab together with the fifth chain, second polypeptide monomer of the spacer dimerizing domain, VH and CH1 of the third domain forming a Fab together with the sixth chain, a fifth chain comprising the VL and CL of the second domain, and a sixth chain comprising the VL and CL of the fourth domain (e.g. FIG. 2G);
[0056] (viii.) a first chain comprising the VL and CL of the first domain, a second chain comprising the VH and CH1 of the first domain, forming a Fab together with the first chain, first polypeptide monomer of the spacer dimerizing domain, second domain in the format of scFv, a third chain comprising the fourth domain in the format of scFv, second polypeptide monomer of the spacer dimerizing domain, VH and CH1 of the third domain, forming a Fab together with the fourth chain, and a fourth chain comprising the VL and CL of the third domain (see e.g. FIG. 2H);
[0057] (ix.) a first chain comprising the first domain in the format of a scFv, the first polypeptide monomer of the spacer dimerizing domain, the third domain in the format of scFv, a third chain comprising the VH and CH1 of the second domain, forming a Fab together with the third chain, the second polypeptide monomer of the spacer dimerizing domain, the VH and CH1 of the fourth domain, forming a Fab together with the fourth chain, a third chain comprising the VL and CL of the second domain, and a fourth chain comprising the VL and CL of the fourth domain (e.g. FIG. 2I);
[0058] (x.) a first chain comprising the VL and CL of the first domain, a second chain comprising the VH and CH1 of the first domain, forming a Fab together with the first chain, first polypeptide monomer of the spacer dimerizing domain, the third domain in the format of scFv, a third chain comprising the VH and CH1 of the second domain, forming a Fab together with the fourth chain, second polypeptide monomer of the spacer dimerizing domain, the fourth domain in the format of a scFv, and a fourth chain comprising the VL and CL of the second domain (e.g. FIG. 2J);
[0059] (xi.) a first chain comprising the VL and CL of the first domain, a second chain comprising the VH and CH1 of the first domain, forming a Fab together with the first chain, first polypeptide monomer of the spacer dimerizing domain, the second domain in the format of scFv, a third chain comprising the VH and CH1 of the fourth domain, forming a Fab together with the fourth chain, second polypeptide monomer of the spacer dimerizing domain, the third domain in the format of a scFv, and a fourth chain comprising the VL and CL of the fourth domain (e.g. FIG. 2K);
[0060] (xii.) a first chain comprising the VL and CL of the first domain, a second chain comprising the VH and CH1 of the first domain, forming a Fab together with the first chain, first polypeptide monomer of the spacer dimerizing domain, a third chain comprising the VH and CH1 of the second domain, forming a Fab together with the fourth chain, second polypeptide monomer of the spacer dimerizing domain, the third domain in the format of scFv, the fourth domain in the format of a scFv, and a fourth chain comprising the VL and CL of the second domain (e.g. FIG. 2L);
[0061] (xiii.) a first chain comprising the VL and CL of the first domain, a second chain comprising the VH and CH1 of the first domain, forming a Fab together with the first chain, first polypeptide monomer of the spacer dimerizing domain, the third domain in the format of scFv, the fourth domain in the format of a scFv, a third chain comprising the VH and CH1 of the second domain, forming a Fab together with the fourth chain, second polypeptide monomer of the spacer dimerizing domain, and a fourth chain comprising the VL and CL of the second domain (e.g. FIG. 2M);
[0062] wherein each scFv comprises in a N to C orientation VH, linker and VL or VL, linker and VH, preferably VH, linker and VL.

[0063] Within said aspect, it is also envisaged in the context of the present invention to provide an antigen-binding molecule, wherein the spacer entity is a globular protein, wherein the distance between the C alpha atoms of the first amino acid located at the N-terminus and the last amino acid at the C-terminus are spaced apart by at least 20 Å, preferably at least 30 Å, more preferably at least 50 Å, in order to effectively space apart the first and the second bispecific entity by preferably at least 50 Å.

[0064] Within said aspect, it is also envisaged in the context of the present invention to provide an antigen-binding molecule, wherein said spacer entity, when the spacer is single-chained, which effectively spaces apart the first and the second bispecific entity is selected from a group consisting of ubiquitin, beta 2 microglobulin, SAND domain, Green fluorescent protein (GFP), VHH antibody lama domain, PSI domain from Met-receptor, Fibronectin type III domain from tenascin, Granulocyte-macrophage colony-stimulating factor (GM-CSF), interleukin-4, CD137L Ectodomain, Interleukin-2, PD-1 binding domain from human Programmed cell death 1 ligand 1 (PDL1), Tim-3 (AS 24-130), MiniSOG, aprogrammed cell death protein 1 (PD1) domain, human serum albumin (HSA) or a derivate of any of the foregoing spacer entities, a multimer of a rigid linker, and a Fc domain or dimer or trimer thereof, each Fc domain comprising two polypeptide monomers comprising each a hinge, a CH2 and a CH3 domain a hinge and a further CH2 and a CH3 domain, wherein said two polypeptide monomers are fused to each other via a peptide linker or wherein the two polypeptide monomers are linked together by non-covalent CH3-CDH3 interactions and/or covalent disulfide bonds to form a heterodimer.

[0065] Within said aspect, it is also envisaged in the context of the present invention to provide an antigen-binding molecule, wherein said spacer entity when single chained is at least one Fc domain, preferably one domain or two or three covalently linked domains, which or each of which comprises in an amino to carboxyl order:

[chemical structure]

[0066] Within said aspect, it is also envisaged in the context of the present invention to provide an antigen-binding molecule, wherein each of said polypeptide monomers in the spacer entity has an amino acid sequence that is at least 90% identical to a sequence selected from the group consisting of: SEQ ID NO: 17-24, wherein preferably each of said polypeptide monomers has an amino acid sequence selected from SEQ ID NO: 17-24.

[0067] Within said aspect, it is also envisaged in the context of the present invention to provide an antigen-binding molecule, wherein the CH2 domain in the spacer comprises an intra domain cysteine disulfide bridge.

[0068] Within said aspect, it is also envisaged in the context of the present invention to provide an antigen-binding molecule, wherein the single chain spacer entity comprises an amino acid sequence selected the group consisting of SEQ ID NO: 13 and 15 to 16 and 25 to 34, ubiquitin (SEQ ID NO: 1081), beta 2 microglobulin (SEQ ID NO: 1083), SAND domain (SEQ ID NO: 1084), Green fluorescent protein (GFP) (SEQ ID NO: 1085), VHH antibody lama domain (SEQ ID NO: 1086), PSI domain from Met-receptor (SEQ ID NO: 1087), Fibronectin type III domain from tenascin (SEQ ID NO: 1088), Granulocyte-macrophage colony-stimulating factor (GM-CSF) (SEQ ID NO: 1089), interleukin-4 (SEQ ID NO: 1090), CD137L Ectodomain (SEQ ID NO: 1091), Interleukin-2 (SEQ ID NO: 1092), PD-1 binding domain from human Programmed cell death 1 ligand 1 (PDL1) (SEQ ID NO: 1093), Tim-3 (AS 24-130) (SEQ ID NO: 1094), MiniSOG (SEQ ID NO: 1095), a programmed cell death protein 1 (PD1) domain (SEQ ID NO: 16), human serum albumin (has, SEQ ID NO: 15) or an amino acid with at least 90%, preferably 95% or even 98% sequence identity thereof, preferably scFc (SEQ ID NO: 25).

[0069] Within said aspect it is also envisaged that the first peptide monomer of the first peptide chain is SEQ ID NO 35 and the second peptide monomer of the second peptide chain is SEQ ID NO 36, wherein the two peptide monomers preferably form a heterodimer.

[0070] Within said aspect it is also envisaged that the antigen-binding molecule is characterized by
[0071] (i) the first and third domain comprise two antibody-derived variable domains and the second and the fourth domain comprises two antibody-derived variable domains;
[0072] (ii) the first and third domain comprise one antibody-derived variable domain and the second and the fourth domain comprises two antibody-derived variable domains;
[0073] (iii) the first and third domain comprise two antibody-derived variable domains and the second and the fourth domain comprises one antibody-derived variable domain; or
[0074] (iv) the first domain comprises one antibody-derived variable domain and the third domain comprises one antibody-derived variable domain.

[0075] Within said aspect, it is also envisaged in the context of the present invention to provide an antigen-binding molecule comprising two polypeptide chains, wherein
[0076] the first polypeptide chain comprises a VH of the first domain, a VH second domain, the first polypeptide monomer comprising preferably a hinge, a CH2 and a CH3 domain, a VH of the third domain, and a VH of the fourth domain; and
[0077] the second polypeptide chain comprises a VL of the first domain, a VL second domain, the first polypeptide monomer comprising preferably a hinge, a CH2 and a CH3 domain, a VL of the third domain, and a VL of the fourth domain,
[0078] wherein preferably the first and second polypeptide monomer form a heterodimer, thereby connecting the first and the second polypeptide chain.

[0079] Within said aspect, it is also envisaged in the context of the present invention to provide an antigen-binding molecule, wherein the first, second, third and fourth binding domain each comprise in an amino to carboxyl order a VH domain and a VL domain, wherein the VH and VL within each domain is connected by a peptide linker, preferably a flexible linker which comprises serine, glutamine and/or glycine as amino acid building blocks, preferably only serine (Ser, S) or glutamine (Gln, Q) and glycine (Gly, G), more preferably (G4S)n or (G4Q)n, even more preferably SEQ ID NO: 1 or 3.

[0080] Within said aspect, it is also envisaged in the context of the present invention to provide peptide linker, wherein the peptide linker comprises or consists of S(G4X)n and (G4X)n, wherein X is selected from the group consisting of Q, T, N, C, G, A, V, I, L, and M, and wherein n is an integer selected from integers 1 to 20, preferably wherein n is 1, 2, 3, 4,5 or 6, preferably wherein X is Q, wherein preferably the peptide linker is (G4X)n, n is 3, and X is Q.

[0081] Within said aspect, it is also envisaged in the context of the present invention to provide an antigen-binding molecule, wherein the peptide linker between the first binding domain and the second binding domain and the third binding domain and the fourth binding domain is preferably a flexible linker which comprises serine, glutamine and/or glycine or glutamic acid, alanine and lysine as amino acid building blocks, preferably selected from the group consisting of SEQ ID NO: 1 to 4, 6 to 12 and 1125.

[0082] Within said aspect, it is also envisaged in the context of the present invention to provide an antigen-binding molecule, wherein the peptide linker between the first binding domain or the second binding domain and the spacer, and/or the third binding domain and the fourth binding domain and the spacer, respectively, is preferably a short linker rich in small and/or hydrophilic amino acids, preferably glycine and preferably SEQ ID NO: 5.

[0083] Within said aspect, it is also envisaged in the context of the present invention to provide an antigen-binding molecule, wherein any of the first target cell surface antigen and the second target cell surface antigen is selected from the group consisting of CS1, BCMA, CDH3, FLT3, CD123, CD20, CD22, EpCAM, MSLN and CLL1.

[0084] Within said aspect, it is also envisaged in the context of the present invention to provide an antigen-binding molecule, wherein the first target cell surface antigen and the second target cell surface antigen are not identical.

[0085] Within said aspect, it is also envisaged in the context of the present invention to provide an antigen-binding molecule, wherein the first target cell surface antigen and the second target cell surface antigen are identical.

[0086] Within said aspect, it is also envisaged in the context of the present invention to provide an antigen-binding molecule, wherein the first binding domains is capable of binding to the first target cell surface antigen and the third binding domain is capable of binding to the second target cell surface antigen simultaneously, preferably wherein the first target cell surface antigen and the second target cell surface antigen are on the same target cell.

[0087] Within said aspect, it is also envisaged in the context of the present invention to provide an antigen-binding molecule of claim 1, wherein the first target cell surface antigen and the second target cell surface antigen, respectively, are selected from the group consisting of CS1 and BCMA, BCMA and CS1, FLT3 and CD123, CD123 and FLT3, CD20 and CD22, CD22 and CD20, EpCAM and MSLN, MSLN and EpCAM, MSLN and CDH3, CDH3 and MSLN, FLT3 and CLL1, and CLL1 and FLT3.

[0088] Within said aspect, it is also envisaged in the context of the present invention to provide an antigen-binding molecule of claim 1, wherein the first target cell surface antigen and/or the second target cell surface antigen is human MSLN (selected from SEQ ID NOs: 1181, 1182 and 1183), and wherein the first and/or third binding domain of the antigen-binding molecule of the invention binds to human MSLN epitope cluster E1 (SEQ ID NO: 1175, aa 296-346 position according to Kabat) as determined by murine chimere sequence analysis as described herein, but preferably not to human MSLN epitope cluster E2 (SEQ ID NO: 1176, aa 247-384 position according to Kabat), E3 (SEQ ID NO: 1177, aa 385-453 position according to Kabat), E4 (SEQ ID NO: 1178, aa 454-501 position according to Kabat) and/or E5 (SEQ ID NO: 1179 aa 502-545 position according to Kabat).

[0089] Within said aspect, it is also envisaged in the context of the present invention to provide an antigen-binding molecule of claim 1, wherein the first target cell surface antigen and/or the second target cell surface antigen is human CDH3 (SEQ ID NOs: 1170), and wherein the first and/or third binding domain of the antigen-binding molecule of claim 1 binds to human CDH3 epitope cluster D2B (SEQ ID NO: 1171, aa 253-290 position according to Kabat), D2C (SEQ ID NO: 1172 aa 291-327 position according to Kabat), D3A (SEQ ID NO: 1173 aa 328-363 position according to Kabat) and D4B (SEQ ID NO: 1174, aa 476-511 position according to Kabat), preferably D4B (SEQ ID NO: 1174, aa 476-511 position according to Kabat), as determined by murine chimere sequence analysis as described herein.

[0090] Within said aspect, it is also envisaged in the context of the present invention to provide an antigen-binding molecule, wherein the second and the fourth binding domain (CD3 binding domains) both have (i.) an affinity lower than characterized by a KID value of about 1.2×10-8 M measured by surface plasmon resonance (SPR), or (ii.) an affinity characterized by a KID value of about 1.2×10-8 M measured by SPR.

[0091] Within said aspect, it is also envisaged in the context of the present invention to provide an antigen-binding molecule, wherein the second and the fourth binding domain (CD3 binding domains) have an affinity characterized by a KID value of about 1.0×10-7 to 5.0×10-6 M measured by SPR, preferably about 1.0 to 3.0×10-6 M, more preferably about 2.5×10-6 M measured by SPR.

[0092] Within said aspect, it is also envisaged in the context of the present invention to provide an antigen-binding molecule, wherein the second and the fourth binding domain (CD3 binding domains) have an affinity characterized by a KD value of about 1.0×10-7 to 5.0×10-6 M measured by SPR, preferably about 1.0 to 3.0×10-6 M, more preferably about 2.5×10-6 M measured by SPR.

[0093] Within said aspect, it is also envisaged in the context of the present invention to provide an antigen-binding molecule, wherein each of the second and the fourth binding domain (CD3 binding domains) individually has an at least about 10-fold, preferably at least about 50-fold or more preferably at least about 100-fold lower activity than one CD3 binding domain comprising a VH according to SEQ ID NO 43 and a VL according to SEQ ID NO 44 (i.e. in a mono targeting context in contrast to a dual targeting context).

[0094] Within said aspect, it is also envisaged in the context of the present invention to provide an antigen-binding molecule, wherein the second and the fourth domain are effector binding domains binding to CD3ε chain which comprise or consist of a VH region linked to a VL region, wherein
[0095] i) the VH region comprises:
[0096] a CDR-H1 sequence of X1YAX2N, where X1 is K, V, S, G, R, T, or I; and X2 is M or I;
[0097] a CDR-H2 sequence of RIRSKYNNYATYYADX1VKX2, where X1 is S or Q; and X2 is D, G, K, S, or E; and
[0098] a CDR-H3 sequence of HX1NFGNSYX2SX3X4AY, where X1 is G, R, or A; X2 is I, L, V, or T; X3 is Y, W or F; and X4 is W, F or Y; and
[0099] ii) wherein the VL region comprises:
[0100] a CDR-L1 sequence of X1SSTGAVTX2X3X4YX5N, where X1 is G, R, or A; X2 is S or T; X3 is G or S; X4 is N or Y; and X5 is P or A;
[0101] a CDR-L2 sequence of X1TX2X3X4X5X6; where X1 is G or A; X2 is K, D, or N; X3 is F, M or K; X4 is L or R; X5 is A, P, or V; and X6 is P or S; and
[0102] a CDR-L3 sequence of X1LWYSNX2WV, where X1 is V, A, or T; and X2 is R or L; and
[0103] iii) wherein one or more of CDR sequences of the VH region of i) and/or of the VL region of ii) comprise one amino acid substitution or a combination thereof selected from X24V and X24F in CDR-H1;
[0104] D15, and X116A in CDR-H2;
[0105] H1, X12E, F4, and N6 in CDR-H3; and
[0106] X11L and W3 in CDR-L3.

[0107] Within said aspect, it is also envisaged in the context of the present invention to provide an antigen-binding molecule, wherein the second and the fourth binding domain comprise a VH region comprising CDR-H 1, CDR-H2 and CDR-H3 selected from SEQ ID NOs 37 to 39, 45 to 47, 53 to 55, 61 to 63, 69 to 71, 436 to 438, 1126 to 1128, 1136 to 1138, 1142 to 1144, 1148 to 1150, and 1217 to 1219 and a VL region comprising CDR-L1, CDR-L2 and CDR-L3 selected from SEQ ID NOs 40 to 42, 48 to 50, 56 to 58, 64 to 66, 72 to 74, 439 to 441, 1129 to 1131, 1139 to 1141, 1145 to 1147, 1151 to 1153, and 1220 to 1222, preferably 61 to 63 and 64 to 66 or 1217 to 1219 and 1220 to 1222.

[0108] Within said aspect, it is also envisaged in the context of the present invention to provide an antigen-binding molecule, wherein the second and fourth binding domain comprise a VH region selected from SEQ ID NOs 43, 51, 59, 67, 75, 442, 1132 and 1223, preferably 67 or 1223.

[0109] Within said aspect, it is also envisaged in the context of the present invention to provide an antigen-binding molecule, wherein the second and fourth binding domain comprise a VL region selected from SEQ ID NOs 44, 52, 60, 68, 76, 443 1133 and 1224, preferably 68 or 1224.

[0110] Within said aspect, it is also envisaged in the context of the present invention to provide an antigen-binding molecule, wherein the second and fourth binding domain comprising a VH region selected from SEQ ID NOs 43, 51, 59, 67, 75, 442, 1132 and 1223, preferably 67, and a VL region selected from SEQ ID NOs 44, 52, 60, 68, 76, 443, 1133 and 1224, preferably 68, wherein when the VH region is 1132 and the VL region is 1133, the second and/or fourth binding domain as scFab domain additionally comprises a CH1 domain of SEQ ID NO: 1134 and a CLK domain of SEQ ID NO: 1135, and wherein the VH and VL region are linked to each other by a linker preferably selected from SEQ ID NO 1, 3 and 1125, or wherein the VH of the VH-CH1 of the second and forth domain is SEQ ID NO is SEQ ID NO 1223, and the CH1 of the VH-CH1 of the second and forth domain is SEQ ID NO is SEQ ID NO 1224, and the VL of the VL-CL of the second and forth domain is SEQ ID NO is SEQ ID NO 1225, and the CL of the VL-L of the second and forth domain is SEQ ID NO is SEQ ID NO 1226. Within said aspect, it is also envisaged in the context of the present invention to provide an antigen-binding molecule, wherein the first and/or the third (target) binding domain bind to CDH3 and comprise a VH region comprising SEQ ID NO: 1154 as CDR-H 1 wherein X1 (the number behind the “X” indicates the numerical order of the “X” in respective amino acid sequence in N-to C-orientation in the sequence table) is S or N, X2 is Y or S, X3 is P or W, X4 is I or M and X5 is Y, N or H; SEQ ID NO: 1155 as CDR-H2 wherein X1 is K, V, N or R; X2 is A, D, R, Y, S, W or H; X3 is Y, S, P, G or T; X4 is S, G or K; X5 is A, V, D, K, G, or T; X6 is A, V, D, K, S, G or H; X7 is Y, G, or E; X8 is K, I, or N; X9 is A, S, or N; X10 is S, Q or G; X11
[0111] is S or K; X12 is F or V; and X13 is K or Q; and SEQ ID NO: 1156 as CDR-H3, wherein X1 is F or Q; X2 is R,K,S or W; X3 is G or D; X4 is Y, P or R; X5 is R, S, G, N or T; X6 is Y,A or H; X7 is F, L or M; X8 is A or V; and X9 is Y or V; and wherein the first and/or the third (target) binding domain bind to CDH3 and comprise a VL region comprising SEQ ID NO: 1158 as CDR-L 1 wherein X1 is K or R, X2 is A or S; X3 is Q,D,S,G or E; X4 is S,D or N; X5 is V,L or I; X6 is,K,Y,S,or H; X7 is S or N; X8 is F,L or M; and X9 is A,N or H; SEQ ID NO: 1159 as CDR-L 2 wherein X1 is Y,G,W,N; X2 is T or A; X3 is S or K; X4 is T,N or R; X5 is L or R; X6 is E,A,V or H; and X7 is S or E; and SEQ ID NO: 1160 as CDR-L3 wherein X1 is Q or V; X2 is Q,N or H; X3 is
[0112] F,L,Y,W,N, or H; X4 is A,D,Y,S or N; X5 is Q,R,S,G,W or M; X6 is T,Y or F; and X7 is F,Y or L.

[0113] Within said aspect, it is also envisaged in the context of the present invention to provide an antigen-binding molecule, wherein the first and/or the third (target) binding domain bind to MSLN and comprise a VH region comprising SEQ ID NO: 1162 as CDR-H 1 wherein X1 (the number behind the “X” indicates the numerical order of the “X” in respective amino acid sequence in N- to C-orientation in the sequence table) is S,G or D; X2 is Y,A,G or F; X3 is I,W, or M; and X4 is V,S,G,T, or H; SEQ ID NO: 1163 as CDR-H 2 wherein X1 is A,S,N,W,Y,or V; X2 is Y,S or N; X3 is Y,G,P, or S; X4 is D,H,S, or N; X5 is G or S; X6 is E,G or S; X7 is G,S,N,F,T or Q; X8 is S,W,K,D,I or T; X9 is Y or N; X10 is A or N; X11 is A,P,N,D,E,I or Q; X12 is D,A,S or K; X13 is V,L, or F; X14 is Kor Q; andX15 is
[0114] G or S; and SEQ ID NO: 1164 as CDR-H 3 wherein X1 is D,E or V; X2 is R,G,or E; X3 is Y,A,or N; X4 is S,Y,V, or H; X5 is A,P,F,Y, or H; X6 is R or S; X7 is E or G; X8 is Y or L; X9 is
[0115] R,Y or L; X10 is Y or G; X11 is D or Y; X12 is R,Y, or F; X13 is M,S,F,D or Y; X14 is A,G,S,or T; X15 is L, M,or F; and X16 is Y,I or V; and wherein the first and/or the third (target) binding domain bind to MSLN and comprise a VL region comprising SEQ ID NO: 1166 as CDR-L 1 wherein X1 is A or S; X2 is G or S; X3 is E or Q; X4 is G,S or K; X5 is I,L,V or F; X6 is R,G or S; X7 is D,S,N or T; X8 is A,S,K or T; X9 is Y or W; X10 is V or L; and X1 Iis Y or A; SEQ ID NO 1167 as CDR-L2 wherein X1 is A,G or Q; X2 is A or S; X3 is S or T; X4 is G,S,K,I or T; X5 is R or L; X6 is A,P or Q; and X7 is S or T; and SEQ ID NO 1168 as CDR-L 3 wherein X1 is A or Q; X2 is Y,S,A,or T; X3 is G,E,Y,H or Q; X4 is A or S; X5 is S,T or F; X6 is—,P or T; X7 is R,A,L or F; and X8 is V or T.

[0116] Within said aspect, it is also envisaged in the context of the present invention to provide an antigen-binding molecule, wherein the first and/or the third (target) binding domain bind to CDH3 and comprise a VH region of SEQ ID NO: 1157 wherein (the number behind the “X” indicates the numerical order of the “X” in respective amino acid sequence in N- to C-orientation in the sequence table) X1 is Q or E; X2 is V,L; X3 is Q,E;X4 is A or G; X5 is G or E; X6 is V or L; X7 is K or V X8 is Kor Q, X9 is A orG,XIOis VorL,XIIis KorR,X12 is VorL,X13 is AorK,X14 is YorF,X15 is T or S, X16 is T or S, X17 is S or N, X18 is Y or S, X19 is P or W, X20 is I or M, X21 is Y,N or H, X22 is
[0117] T or A, X23 is Q or K, X24 is V or M, X25 is S or G, X26 is K,V,N or R, X27 is
[0118] A,D,R,Y,S,W or H, X28 is Y,S,P,Gr or T, X29 is S,K,or G, X30 is A,V,D,K, or,T, X31 is A,—,D,K,S,G, or H, X32 is Y,G, or E, X33 is K,I, or N, X34 is A,S, or N, X35 is
[0119] S,Q, or G, X36 is S or K, X37 is F or V, X38 is Q or K, X39 is F or V, X40 is I or M, X41 is T or S, X42 is V,I or R, X43 is T,K or N, X44 is T,A,S or K, X45 is S or N, X46 is A,V or L, X47 is L or M, X48 is Q or E, X49 is L or M, X50 is S or N, X51 is S or R, X52 is T or R, X53 is A or S, X54 is G,D,or E, X55 is T or S, X56 is T,K,or R, X57 is
[0120] S,Q,W,or R, X58 is —,D,or G, X59 is Y,P,or R, X60 is F,S,G,N or T, X61 is Y,A,or H, X62 is A,—,or V, X63 is F or M, X64 is Y or V; X65 is T,L or M; and a VL region of SEQ ID NO 1161 wherein X1 is D or E; X2 Q or V; X3 is L,M; X4 is A,S or D; X5 is F,S or T; X6 is A,S; X7 is A,V; X8 is P,V,L; X9 is D,E; X10 is A,V; X11 is I,L; X12 is T,S,N; X13 is K,R; X14 is A,S; X15 is Q,D,S,G or E; X16 is S,D,N; X17 is V,I or L; X18 is —,K,Y,S or H; X19 is S,N; X20 is F,L,M; X21 is A,N,H; X22 is K,Q; X23 is
[0121] A,P,V; X24 is K,R; X25 is I,V; X26 is Y,G,W,N; X27 is T,A; X28 is S,K; X29 is T,N,R; X30 is L,R; X31 is E,A,V,H; X32 is S,E; X33 is A,S,V,D; X34 is D,E; X35 is
[0122] T,K; X36 is S,R; X37 is A,S,P; X38 is F,V; X39 is A,G; X40 is T,V; X41 is Q,V; X42 is Q,N,H; X43 is F,L,Y,W,N,H; X44 is A,D,Y,S,N; X45 is Q,R,S,G,W,M; X46 is F,Y,T; X47 is F,Y,L; X48 is V,L; and X49 is D or E (wherein all aa per position are meant to be in the alternative “or” even if not explicitly stated).

[0123] Within said aspect, it is also envisaged in the context of the present invention to provide an antigen-binding molecule, wherein the first and/or the third (target) binding domain bind to MSLN and comprise a VH region of SEQ ID NO: 1165 wherein (the number behind the “X” indicates the numerical order of the “X” in respective amino acid sequence in N- to C-orientation in the sequence table) X1 is E,Q; X2 is V,L,Q, X3 is E,Q; X4 is A,G,P; X5 is E,G; X6 is V,L; X7 is V,K; X8 is K,Q; X9 is G,S; X10 is E,A,G,R; X11 is S,T; X12 is V,L; X13 is R,S,K; X14 is V,L; X15 is S,T; X16 is A,K,T; X17 is A,V; X18 is Y,I,F; X19 is S,T; X20 is S,F; X21 is S,T; X22 is D,G,S; X23 is Y,G,A,F; X24 is I,W,M; X25 is G,S,V,T,H; X26 is I,V; X27 is A,P; X28 is M,K,Q; X29 is G,C; X30 is I,M,V,L; X31 is A,G,S; X32 is A,S,N,W,Y,V; X33 is Y,S,N; X34 is Y,G,P,S; X35 is D,H,S,N; X36 is G,S; X37 is E,G,S; X38 is G,S,N,F,T,Q; X39 is S,K,W,D,I,—,T; X40 is Y,N; X41 is A,N; X42 is A,P,N,E,D,I,Q; X43 is D,A,S,K; X44 is V,L,F; X45 is K,Q; X46 is G,S; X47 is V,F; X48 is I,M; X49 is S,T; X50 is R,V; X51 is N,T; X52 is A,S; X53 is I,K; X54 is S,N; X55 is S,T,Q; X56 is A,L,F; X57 is Y,S,F; X58 is L,M; X59 is E,K,Q; X60 is M,L; X61 is S,N; X62 is R,S; X63 is V,L; X64 is R,T; X65 is A,S; X66 is D,A,E; X67 is R,K; X68 is D,E,V,L; X69 is E,R,G,P; X70 is R,A,N,Y; X71 is G,S,Y,V,H; X72 is A,P,F,D,Y; X73 is R,G; X74 is M,R,S,D; X75 is E,G; X76 is Y,L; X77 is Y,F; X78 is Y,S,F; X79 is A,G,S,T,H; X80 is L,M,F; X81 is Y,I,V; and X82 is L,M,T; and a VL region of SEQ ID NO 1169 (the number behind the “X” indicates the numerical order of the “X” in respective amino acid sequence in N- to C-orientation in the sequence table) X1 is E,S,D; X2 is Y,I,L; X3 is E,—,V,T; X4 is V,L,M; X5 is P,S; X6 is G,S; X7 is S,T; X8 is V,L; X9 is A,V,L; X10 is P,V; X11 is E,Q,D; X12 is R,T; X13 is A,V; X14 is S,T; X15 is I,L; X16 is S,T; X17 is A,S; X18 is G,S; X19 is E,Q; X20 is G,S,K; X21 is I,V,L,F; X22 is R,G,S; X23 is D,S,—; X24 is A,S,N,K,T; X25 is Y,WM; X26 is V,L; X27 is Y,A; X28 is K,Q; X29 is A,S,V; X30 is R,V,K; X31 is V,L; X32 is A,G,Q; X33 is A,S; X34 is S,T; X35 is G,S,K,I,T; X36 is R,L; X37 is A,P,Q; X38 is S,T; X39 is I,V; X40 is E,S,D; X41 is G,N; X42 is N,T; X43 is D,T; X44 is A,F; X45 is R,G,S; X46 is L,T; X47 is E,Q; X48 is A,P; X49 is E,M; X50 is E,F;; X51 is D,V,T; X52 is A,Q; X53 is Y,S,A,T; X54 is G,E,Y,H,Q; X55 is A,S; X56 is S,T,F; X57 is P,T; X58 is R,A,L,F; X59
[0124] is V,T; X60 is P,C; X61 is V,L; X62 is E,T; X63 is I,V; and X64 is L,K (wherein all aa per position are meant to be in the alternative “or” even if not explicitly stated).

[0125] Within said aspect, it is also envisaged in the context of the present invention to provide an antigen-binding molecule, wherein the first and/or the third (target) binding domain comprise a VH region comprising CDR-H 1, CDR-H2 and CDR-H3 selected from SEQ ID NO: 77 to 79, 86 to 88, 95 to 97, 103 to 105, 111 to 113, 119 to 121, 127 to 129, 135 to 137, 143 to 145, 151 to 153, 159 to 161, 168 to 170, 177 to 179, 185 to 187, 194 to 196, 203 to 205, 212 to 214, 221 to 223, 230 to 232, 238 to 240, 334 to 336, 356 to 358, 365 to 367, 376 to 378, 385 to 387, and 194, 432 and 196, or any combination of CDR-H 1, CDR-H2 and CDR-H3 as disclosed together in the sequence table Tab. 6, preferably 86 to 88,194, to 196 or 1227 to 1229 and 1237 to 1239.

[0126] Within said aspect, it is also envisaged in the context of the present invention to provide an antigen-binding molecule, wherein the first and/or third (target) binding domain comprise a VL region comprising CDR-L1, CDR-L2 and CDR-L3 selected from SEQ ID NO: 80 to 82, 89 to 91, 98 to 100, 106 to 108, 114 to 116, 122 to 124, 130 to 132, 138 to 140, 146 to 148, 154 to 156, 162 to 164, 171 to 173, 180 to 182, 188 to 190, 197 to 199, 206 to 208, 215 to 217, 224 to 226, 233 to 235, 241 to 243, 337 to 339, 359 to 361, 368 to 370,379 to 381,388 to 390, or any combination of CDR-H 1, CDR-H2 and CDR-H3 as disclosed together in the sequence table Tab. 6, preferably 89 to 91 and 197 to 199 or 1230 to 1232 and 1240 1242.

[0127] Within said aspect, it is also envisaged in the context of the present invention to provide an antigen-binding molecule, wherein the first and/or third (target) binding domain comprise a VH region selected from SEQ ID NO: 83, 92, 101, 109, 117, 125, 133, 141, 149, 157, 165, 174, 183, 191, 200, 209, 218, 227, 236, 244, 340, 362, 371, 382, 391 and 433, preferably 433 and 92 or 1233+1235 and 1243+1245 (VH and CH1 in Fab) for the first and third binding domain, respectively.

[0128] Within said aspect, it is also envisaged in the context of the present invention to provide an antigen-binding molecule, wherein the first and/or third (target) binding domain comprises a VL region selected from SEQ ID NO: 84, 93, 102, 110, 118, 126, 134, 142, 150, 158, 166, 175, 184, 192, 201, 210, 219, 228, 237, 245, 341, 363, 372, 383, 392, preferably 200 and 93 or 1234+1236 and 1244+1246 (VL and CL in Fab) for the first and third binding domain, respectively.

[0129] Within said aspect, it is also envisaged in the context of the present invention to provide an antigen-binding molecule, wherein the first and/or third (target) binding domain comprises a VL region of increased stability by a single amino acid exchange (E to I), selected from SEQ ID NO: 85, 94, 193, 202, 211, 220, 229, 364, 384, 393, preferably 94 and 202.

[0130] Within said aspect, it is also envisaged in the context of the present invention to provide an antigen-binding molecule, which comprises a combination of amino acid sequences selected from the group consisting of SEQ ID NOs: 1259 and 1251, 1247 and 1248, 1249 and 1250, 1254, 1255 and 1253, 1252, 1257, 1253 and 1256, and 1254, 1258, 1253 and 1256.

[0131] In a second aspect, it is further envisaged in the context of the present invention to provide a polynucleotide encoding an antigen-binding molecule of the present invention, preferably selected from SEQ ID NO: 1070 to 1072 and 1074.

[0132] In a third aspect, it is also envisaged in the context of the present invention to provide a vector comprising a polynucleotide of the present invention.

[0133] In a fourth aspect, it is further envisaged in the context of the present invention to provide a host cell transformed or transfected with the polynucleotide or with the vector of the present invention.

[0134] In a fifth aspect, it is also envisaged in the context of the present invention to provide a process for the production of an antigen-binding molecule of the present invention, said process comprising culturing a host cell of the present invention under conditions allowing the expression of the antigen-binding molecule and recovering the produced antigen-binding molecule from the culture.

[0135] In a sixth aspect, it is further envisaged in the context of the present invention to provide a pharmaceutical composition comprising an antigen-binding molecule of the present invention or produced according to the process of the present invention.

[0136] Within said aspect, is also envisaged in the context of the present invention that the pharmaceutical composition is stable for at least four weeks at about −20° C.

[0137] It is further envisaged in the context of the present invention to provide the antigen-binding molecule of the present invention, or produced according to the process of the present invention, for use in the prevention, treatment or amelioration of a disease selected from a proliferative disease, a tumorous disease, cancer or an immunological disorder.

[0138] Within said aspect, it is also envisaged in the context of the present invention that the disease preferably is acute myeloid leukemia (AML), Non-Hodgkin lymphoma (NHL), Non-small-cell lung carcinoma (NSCLC), pancreatic cancer and Colorectal cancer (CRC)].In a seventh aspect, it is further envisaged in the context of the present invention to provide a method for the treatment or amelioration of a proliferative disease, the method comprising administering to a subject in need thereof a molecule comprising at least one polypeptide chain, wherein the molecule comprises
[0139] (i.) a first binding domain which preferably comprises a paratope which specifically binds to a first target cell surface antigen (e.g. TAA1),
[0140] (ii.) a second binding domain which preferably comprises a paratope which specifically binds to an extracellular epitope of the human—and preferably the Macaca—CD3ε chain,
[0141] (iii.) a third binding domain which preferably comprises a paratope which specifically binds to a second target cell surface antigen (e.g. TAA2), and
[0142] (iv.) a fourth binding domain which preferably comprises a paratope which specifically binds to an extracellular epitope of the human—and preferably the Macaca—CD3ε chain,
[0143] wherein the first binding domain and the second binding domain form a first bispecific entity and the third and the fourth binding domain form a second bispecific entity, and
[0144] wherein the molecule comprises a spacer entity having a molecular weight of at least about larger than about 5 kDa and/or having a length of more than 50 amino acids, wherein the spacer entity spaces apart the first and the second bispecific entity by at least about 50 Å (distance between centers of mass of the first and the second bispecific entity), and which spacer entity is positioned between the first and the second bispecific entity.

[0145] Within said aspect, it also envisaged in the context of the present invention also provides a method to address a disease-associated target being significantly co-expressed on a pathophysiological and one or more physiological tissues by providing a multichain multitargeting bispecific antigen-binding molecule of the format described herein, wherein the molecule addresses (i.) the target expressed both on the disease-associated and the physiological tissue and (ii.) a further target which is disease associated but not expressed on the physiological tissue under (i.), wherein the method preferably avoids the formation of intra-abdominal adhesions and/or fibrosis where such target is MSLN.

[0146] Within said aspect, it is also envisaged in the context of the present invention that the disease preferably is a tumorous disease, cancer, or an immunological disorder, comprising the step of administering to a subject in need thereof the antigen-binding molecule of the present invention, or produced according to the process of the present invention, wherein the disease preferably is acute myeloid leukemia, Non-Hodgkin lymphoma, Non-small-cell lung carcinoma, pancreatic cancer and/or Colorectal cancer.

[0147] Within said aspect, it is also envisaged in the context of the present invention that TAA1 and TAA2 are preferably selected from EpCAM and MSLN, MSLN and EpCAM, MSLN and CDH3, CDH3 and MSLN, FLT3 and CLL1, and CLL1 and FLT3.

[0148] In an eighth aspect, it is also envisaged in the context of the present invention to provide a kit comprising an antigen-binding molecule of the present invention, or produced according to the process of the present invention, a polynucleotide of the present invention, a vector of the present invention, and/or a host cell of the present invention.

### DESCRIPTION OF THE FIGURES

[0149] FIG. 1: Overview of multichain multitargeting bispecific antigen-binding molecules disclosed in the invention comprising a dimerizing domain as spacer. Black domains are Anti-CD3 domains, and striped and dotted domains are target binding domains (see in-figure legend of FIG. 2). Domain arrangement in each molecule as follows: A: target binding domains and CD3 binding domains in the format of scFv, both N- and C-terminally of dimerizing spacer domain, respectively (“cis” orientation, i.e. the at least two target binding domains and at least two CD3 binding domains are connected to the same monomer of the dimerized spacer, respectively, or in other words, are on the same side of a vertical plane defined by the dimerizing spacer cutting the dimerizing spacer); B: first target binding domain is a Fab, CD3 binding domains and other target binding domain are in the form of scFv, both N- and C-terminally of spacer dimerizing domain, respectively (trans orientation, i.e. the at least two target binding domains and at least two CD3 binding domains are connected to the opposite monomer of the dimerized spacer, respectively, or in other words, are on the opposite side of a vertical plane defined by the dimerizing spacer cutting the dimerizing spacer); C: both at least two target binding domains are Fabs, and CD3 binding domains are in the form of scFvs, both N- and C-terminally of spacer dimerizing domain, respectively (trans); D: both at least two target binding domains are Fabs N-terminally of dimerizing spacer domain, both and CD3 binding domains are in the form of scFv; E: target binding domains are Fabs N-terminally of spacer dimerizing domain and CD3 binding domains are Fabs C-terminally of spacer dimerizing domain

[0150] FIG. 2: FIG. 2 A to M shows examples of multichain multitargeting bispecific antigen-binding molecules of the invention, wherein the spacer is a dimerizing heteroFc, and wherein at least three of the four N- and C-termini, respectively, are linked to a target and/or CD3 binding domain.

[0151] FIG. 3: FIG. 3 A to H shows examples of multichain multitargeting bispecific antigen-binding molecules of the invention, wherein the spacer is a dimerizing heteroFc, and wherein one N- and one C-terminus out of the four N- and C-termini of the heteroFc, respectively, are linked to a target and/or CD3 binding domain (A, C, E to G), or wherein the spacer is a scFv (B, D and H) . . . .

[0152] FIG. 4: FIG. 4 A to I shows cytotoxicity curves of CDH3 T-cell engager molecule 1, MSLN T-cell engager molecule 1 and MSLN-CDH3 T-cell engager molecules 1-7 on parental double positive HCT116 WT cells versus target-knockout HCT116 cells. Effector cells were unstimulated Pan T-cells . . . .

[0153] FIG. 5: FIG. 5 A to I shows cytotoxicity curves of CDH3 T-cell engager molecule 1, MSLN T-cell engager molecule 1 and MSLN-CDH3 T-cell engager molecules 1-7 on parental double positive GSU WT cells versus target-knockout GSU cells. Effector cells were unstimulated Pan T-cells.

[0154] FIG. 6: FIG. 6. A to C shows cytotoxicity curves of mono CDH3 T-cell engager molecule 1 (A), MSLN T-cell engager molecule 1 (B) and MSLN-CDH3 T-cell engager molecule 24 comprising both target binder in Fab format on parental double positive GSU WT cells versus target-knockout GSU cells. Effector cells were unstimulated Pan T-cells.

### DETAILED DESCRIPTION

[0155] In the context of the present invention, a multichain multitargeting bispecific molecule is provided comprising at least five distinctive structural entities, i.e. (i.) a first domain binding to a target cell surface antigen (e.g. a first tumor associated antigen, TAA), (ii.) a second domain binding to an extracellular epitope of the human—and preferably non-human, e.g. Macaca—CD3ε chain, wherein the first binding domain and the second binding domain together form a first bispecific entity, (iii.) a spacer which connects but spaces apart the first bispecific entity from a second bispecific entity comprising (iv.) a third domain binding to the same or preferably a different target cell surface antigen (e.g. a second TAA), and (v.) a fourth domain binding to an extracellular epitope of the human—and preferably non-human, e.g. Macaca—CD3ε chain. Molecules of the format of the present invention typically exhibit the advantage to be characterized by avidity-driven potency and specificity from two targets being co-expressed on the target cell, which typically leads to a reduction of undesired cytokine release (and associated clinically relevant side effects such as CRS) while at the same time ensuring effective antitumor activity, preferably also in solid tumors such as colorectal cancer, non-small-cell lung carcinoma and pancreatic cancer.

[0156] It is a surprising finding in the context of the present invention that bispecific (T-cell engaging) multichain multitargeting (antigen-binding) molecules according to the present invention provides a double avidity effect, both on the target cell binder and the effector cell binder side due to their specific format which leads to an efficient each other complementing target cell kill. This effect is facilitated by the molecule format specifically targeting two (different) antigens on one target cell, such as a cancer cell, and in contrast, by significantly less targeting non-target cells while mediating a potent T-cell response against said target cell at the same time. By being capable to address two target antigens at the same time, the likeliness of targeting a target cell associated with a disease instead of a physiologic cell is greatly increased when two TAAs are chosen which are typically associated with a target cell associated with a disease. Hence, a T-cell engaging multichain multitargeting molecule according to the present invention, both provides improved efficacy and safety with regard to existing bispecific antibodies or antibody-derived constructs which are T-cell engaging. Said advantageous properties are preferably achieved by the fact that the multichain multitargeting bispecific molecules of the present invention comprise two bispecific entities comprising each a target binding domain and an effector (CD3) binding domains which can act in a pathophysiologic environment without (e.g. sterically) hindering each other while complementing each other at the same time. Said action of the two bispecific entities within the one multichain multitargeting bispecific molecule of the present invention from each other means that the target binding domain (e.g. the first domain) and the effector CD3 binding domain (e.g. the second domain) of the first bispecific entity can interact with their respective binding partners to form a cytolytic synapse between target cell and T-cell, without disturbing interaction with the target binding domain (e.g. the third domain) and the effector domain (e.g. the forth domain) of the second bispecific entity. However, in order to provide the desired action and, in consequence, therapeutic function, preferably both target binding domains of both the first and the second bispecific entity must engage their respective target in order to involve the effector CD3 binding domains of the first and second bispecific entity completely. Further, it was a surprising finding that the two respective bispecific entities must be functionally preserved by structural separation in the molecule format in a specific manner in order to benefit from the double avidity effect required to achieve the extraordinary efficacy described and safety implied herein. It was especially surprising that the two bispecific entities comprising a target binding and a CD3 binding domain, respectively, do not need to be on one chain N- and C-terminally of the (central) spacer in order to structurally positioned to act as described herein. Both the target and/or CD3 binder of one or both bispecific entities can be a Fab, i.e. comprise to chains respectively. What is more surprising is the fact that also the spacer may be two-chained, preferably in the form of a heteroFc. In such a case, it is surprising that also bispecific entities when two domains ate not on the same chain but kept close together by means of the four-moiety spacer (e.g. hetero Fe) which at the same time keeps the two domains of each bispecific entity in place to act together and separates the two bispecific entities from each other to act without interfering with each other. This arrangement of spacer and domains and the employment of two different TAA binding domains are two CD3 binding domains of preferably low affinity—preferably binding to CD3ε— leads to the surprising technical effect of increased target cell selectivity and the reduced risk of the key side effect, i.e. undesired cytokine release. At the same time, multichain molecules of the invention can be produced well both regarding yield and purity.

[0157] As a secondary effect in addition or alternatively to the herein described increased specificity, and therefore safety, the likeliness of targeting a target cell such as a cancer cell by a multichain multitargeting antigen-binding molecule versus a monotargeting molecule is greatly increased once such target cell has undergone antigen loss and, thus, is prone to tumor escape from effective anti-tumor therapy because one valid antigen to target remains on the cell which has undergone antigen escape. Said effect in terms of increased activity compared to molecules comprising only one CD3 binder and/or target binder and do not comprise the two linked but spaced apart bispecific entities is preferably achieve when both CD3 binders are of low affinity, such as a CD3 binding domain comprising a VH and VL of, for example, SEQ ID NOs 67 and 68, respectively, linked by a linker of SEQ ID NO 1 or 3.

[0158] The above-specified finding underlying the present invention is surprising in view of the teaching of the prior art. For example, antigen-binding formats comprising more than one target binding domain and effector binding domain, respectively, are known in the art, e.g. the Adaptir™ format. However, such formats do not provide two bispecific entities which can individually interact with their respective target and effector and work together at the same time and, consequently, cannot achieve the effect of double avidity on both the target binder and the effector binder side to the extent of effectively providing a large selectivity gap to the advantage of the multichain multitargeting molecule. According to the present invention, the two bispecific entities must be spaced apart from each other by a certain distance, preferably of at least 50 Å, more preferably at least 60, 70, 80, 90 or at least 100 Å. The indicated distance [Å] between the two bispecific entities is typically understood in the context of the present invention as the distance between the centers of mass of the two bispecific entities, respectively. In general, the center of mass (COM) of a distribution of mass (here, a bispecific entity comprising a binding domain which binds to a target cell surface antigen and a binding domain which binds to an extracellular epitope of the human—and preferably the Macaca—CD3ε chain, both binding domains preferably in a Fab or a single domain format, preferably selected from scFv and scFab format and linked by a peptide linker) in space is understood as the unique point where the weighted relative position of the distributed mass sums to zero. The distance is typically determined by molecular modeling making use of generally accepted modeling programs (MD/visualization software) which can identify COMs given input structures and such as PyMOL (The PyMOL Molecular Graphics System, Version 2.3.3, Schrödinger, LLC.) which is typically based on ensembles of snapshot structures from MD simulations. The mass of each atom is typically part of an underlying “force field” as generally known in the art. Alernatively and/or additionally, distances can be determined by crystallography, cryo electron microscopy, or nuclear magnetic resonance analytic technology.

[0159] A typical approach of obtaining distances through molecular modeling as given in the present invention is as follows:
[0160] 1) Obtaining an atomistic structure of the complete bispecific antigen-binding molecule. Structure sources may be selected from the group consisting of:
[0161] a. Protein X-ray crystallography with resolution preferably below 5 Å enabling visibility of amino acid backbones and side-chains;
[0162] b. Cryogenic electron microscopy (cyo-EM) with resolution preferably below 5 Å enabling visibility of amino acid backbones and side-chains;
[0163] c. In silico homology modeling of the entire molecule based on a single, highly-homologous crystal and/or cro-EM structure (preferably above 60% sequence identity);
[0164] d. In silico homology modeling involving linking 2 or more experimental structures. The structures are preferably identical or highly homologous (preferably above 60% sequence identity) to domains found in the complete bispecific antigen-binding molecule. In case of lack of experimental linker conformations, the model is preferably refined in an explicit-solvent Molecular Dynamics (MD) simulation (simulation length of preferably at least 100 ns unless energy convergence is obtained faster). The simulation is carried out with a state-of-the-art software (e.g. Schrodinger, Amber, Gromacs, NAMD or equivalent) with parameters corresponding to room temperature and pressure. No artificial forces are applied during the simulation (i.e. preferably excludes methods such as metadynamics or steered molecular dynamics). Similarly, preferably no artificial geometrical restraints are imposed on the molecule.
[0165] 2) Identifying centers of mass (COM) of the relevant molecule domains. This is typically performed with the used MD software or with visualization tools such as PyMOL or VMD. The centers of mass can be defined as a pseudo-atoms or non-hydrogen atoms closest to the true COM. Inter-domain linkers are typically not considered as part of the domain.
[0166] 3) Using the same software, report the distance (in Angstrom, Å) between the two COMs. If an MD simulation was used to refine a homology model (as described in Id), the median distance over multiple simulation snapshots is reported. To further diminish potential inaccuracy of the initial model, at least the first 10% of the simulation, preferably up to 50% if the signal significantly changes, are omitted when calculating the median distance between COMs and when extracting the snapshots for visualizing the MD simulation.

[0167] If not indicated otherwise, distances [Å] in the context of the present invention are median distances as determined by MD simulations.

[0168] The preferred distance between the first and the second bispecific entity as disclosed herein is facilitated by a spacer entity (in short spacer) between the two bispecific entities which spaces the two bispecific entities apart and keeps them in a separated position. The spacer is of a certain size, preferably at least more than 5 kDa, more preferably at least about 10, 15, 20, 25, 30, 35, 40, 45 or even at least 50 kDa and hereby prevents an undesired interaction of the two separated bispecific entities. The preferred range in molecular size of the spacer is about 15 to 200 kDa, preferably about 15 to 150 kDa, in order to facilitate the separation of the two bispecific entities according to the present invention and to maintain a high overall activity of the molecule. Typically, too large spacers, e.g. larger than about 200 kDa, may impact the ability of the two bispecific entities to bind to two target surface structures on the same target cell which in turn may reduce the overall activity of the molecule against the target cell. Hence, the typical maximum preferred size in terms of molecular weight of the spacer is about 200 kDa, preferably about 150 or 120 kDa and even more preferably about 100 kDa. A typical spacer of maximum preferred size is a double scFc domain as disclosed herein (two scFc linked to each other forming one larger single chain spacer) of about 105.7 kDa. Example sizes of spacers which typically sufficiently separate the two bispecific entities are PSI domain of Met-receptor of about 5.3 kDa, ubiquitin of about 8.6 kDa, fibronectin type III domain from tenascin of about 10.1 kDa, SAND domain of about 11 kDa, neta-2-microglobulin of about 11.9 kDa, Tim-3 (aa 24-130) of about 12.2 kDa, MiniSOG of about 13.3 kDa, SpyCatcher of about 12.1 kDa associated with SpyTag of about 1.7 kDa linked together preferably via isopeptide bond formation to form a two-chain-spacer of about 13.8 kDa, VHH antibody lama domain of about 14 kDa, PD-1 binding domain from human programmed cell death 1 ligand (PDL1) of about 14.4 kDa, granulocyte-macrophage colony stimulating factor (GM-CSF) of about 14.5 kDa, intrleukin-4 of about 15 kDa, interleukin-2 of about 15.4 kDa, CD137L (4-1BBL; TNFSF9) ectodomain of about 17.7 kDa, programmed cell death protein 1 (PD-1) of about 16.6 kDa, green fluorescent protein (GFP) of about 26.3 kDa, single chain Fc region (scFc) as described herein of about 52.8 kDa (about 54.6 kDa with N- and C-terminal linkers (G₄S)₃, respectively), human serum albumin (HSA) of about 66.5 kDa (about 68.3 kDa with N- and C-terminal linkers (G₄S)₃, respectively) and double scFc (two scFc linked to each other forming one larger single chain spacer) of about 105.7 kDa (about 107.5 kDa with N- and C-terminal linkers (G₄S)₃, respectively). In general, the more rigid the spacer is, the less is the median distance required which otherwise has to include a safety margin for flexible spacers.

[0169] Also, a preferred spacer in the context of the present invention, such as a globular domain, typically has a N- and a C-terminus which are spatially not too close to each other in order to efficiently space apart the two bispecific entities according to the invention. In this regard, spacers typically show a distance between the N- and the C-terminus which is significantly larger than 10 Å. A distance between N- and C-terminus of the spacer which is lower or about 10 Å is considered “close”. Hence, a spacer in the context of the present invention preferably has a distance between the alpha-carbon atoms of the first amino acid located at the N-terminus and the last amino acid at the C-terminus of at least 20 Å, more preferably at least 30 Å, even more preferably at least 50 Å, which distance typically ensures to space the first and the second bispecific entity apart by at least 50 Å as described herein. Alpha-carbon (α-carbon) is understood herein as a term that applies to proteins and amino acids. It is the backbone carbon before the carbonyl carbon atom in the molecule. Therefore, reading along the backbone of a typical protein would give a sequence of—[N-Cα-carbonyl C]n- etc. (when reading in the N to C direction). The α-carbon is where the different substituents attach to each different amino acid. That is, the groups hanging off the chain at the α-carbon are what give amino acids their diversity. Hence, in the context of the present invention, a spacer is less preferred, even if it has a size of at least 5 kDa and a length of more than 50 aa if the distance between the alpha-carbon atoms of the first amino acid located at the N-terminus and the last amino acid at the C-terminus is too close, i.e. if it is only, e.g., about 10 Å. For example, preferred spacers show typical distances between the alpha-carbon atoms of the first amino acid located at the N-terminus and the last amino acid at the C-terminus as follows: scFc (based on 5G4S crystal structure) 89 Å, HSA (based on 5VNW crystal structure): 77 Å, ubiquitin (based on 1UBQ crystal structure): 37 Å and SAND (based on 1OQJ crystal structure): 32 Å. In contrast, HSP70-1 (based on 3JXU crystal structure) shows only a distance of 9 Å between the alpha-carbon atoms of the first amino acid located at the N-terminus and the last amino acid at the C-terminus. At the same time, HSP70-1 provides only a median distance between the COMs of first and the second bispecific entity in the context of the present invention of about 48 Å which is below the threshold of 50 Å median distance, and significantly below the typically about 60-100 Å median distance between the COMs of the two bispecific entities as facilitates by preferred spacers such as scFc, HSA, ubiquitin and SAND. Thereof, scFc (SEQ IN NO: 25) is preferred.

[0170] Alternatively, a non-globular but rigid linker may serve as a spacer in the context of the present invention which spaces apart the two bispecific entities. Such linkers comprise (PA)25P (SEQ ID NO: 1097) and A(EAAAK)4ALEA(EAAAK)4 Å (SEQ ID NO: 1096), even if the Mw is below 5 kDa (here 4.3 kDa) and the amino acid length is only about or below 50 (51 and 46 aa, respectively). However, such spacers are typically less preferred than globular domains which preferably additionally increase half-life.

[0171] As it is also contemplated within the context of the present invention, the spacer between the two bispecific entities is a polypeptide which typically comprises more than 50 amino acids, preferably at least about 75, 100, 150, 200, 250, 300, 350, 400, 450 or at least 500 amino acids. The preferred range in amino acid length of the spacer is about 100 to 1500 amino acids, preferably about 100 to 1000 amino acids, more preferably about 250 to 650 amino acids in order to facilitate the separation of the two bispecific entities according to the present invention. This is to preferably maintain a high overall activity of the entire molecule according to the present invention (not necessarily of the individual and spaced-apart bispecific entities, which may have low affinities (and low activities) individually in order to increase specificity for double positive target cells) which is typically below 20 pM, preferably below 5 pM, more preferably below 1 pM. Typically, too large spacers, e.g. longer than about 1500 amino acids, may impact the ability of the two bispecific entities to bind to two target surface structures on the same target cell which in turn may reduce the overall activity of the molecule against the target cell. Hence, the typical maximum preferred length of the spacer is about 1500 amino acids, more preferably about 1000 amino acids. Example amino acid lengths of spacers which sufficiently separate the two bispecific entities are PD-1 of about (ECD 25-167) 143 aa, scFc as described herein of about 484 aa (about 514 aa with N- and C-terminal linkers (G₄S)₃, respectively), HSA of about 585 aa (about 615 aa with N- and C-terminal linkers (G₄S)₃, respectively), and double scFc of about 968 aa (about 998 aa with N- and C-terminal linkers (G₄S)₃, respectively). Further spacers include, ubiquitin of about 76 aa, fibronectin type III domain from tenascin of about 90 aa, SAND domain of about 90 or 97 aa, beta-2-microglobulin of about 100 aa, Tim-3 (aa 24-130) of about 108 aa, MiniSOG of about 115 aa, SpyCatcher of about 113 aa associated with SpyTag of about 14 aa linked together preferably via isopeptide bond formation to form a two-chain-spacer of about 127, VHH antibody lama domain of about 129 aa, PD-1 binding domain from human programmed cell death 1 ligand (PDL1) of about 126 aa, granulocyte-macrophage colony stimulating factor (GM-CSF) of about 127 aa, interleukin-4 of about 129 aa, interleukin-2 of about 133 aa, CD137L (4-1BBL; TNFSF9) ectodomain of about 167 aa, and green fluorescent protein (GFP) of about 238 aa.

[0172] The composition and arrangement of the preferred spacer amino acid sequences preferably confer a certain rigidity and are not characterized by high flexibility. Rigidity in the context of the present invention is typically present when a spacer of more than 50 aa and/or a molecular weight over 5 kDa facilitates a maximum distance between the centers of mass of the two bispecific entities in a molecule according to the present invention which is smaller than 200% (or 2-fold) the median distance. Accordingly, a preferred rigid spacer in the context of the present invention does not extend further than about 100% of its median length, more preferably not more than about 80% (each calculated as distance between centers of mass of the two bispecific entities). Hence, a preferred rigid spacer in the context of the present invention which spaces apart the two bispecific entities by about 100 Å (median distance) does not extend further than to 200 Å (maximum distance). For example, a typical median distance between centers of mass of the bispecific entities of a molecule having the format of the present invention comprising a scFc (such as SEQ ID NO: 25) as spacer is about 101 Å. However, a maximum distance in such a case is typically about 182 Å, i.e. not more than about 100% or even only about 80% with respect to the median distance. Such a spacer is considered rigid in the context of the present invention. In contrast, a molecule comprising a (G₄S)₁₀ (SEQ ID NO: 8) as spacer, which is a liner polypeptide without a e.g. globular structure, shows a typical a median distance of about 48 Å and a maximum distance of about 179 Å. Hence, such a spacer as (G₄S)₁₀ shows a high flexibility and not the rigidity of a preferred spacer as advantageous feature according to the present invention. In this regard, spacer amino acid sequences may typically be rich in proline and less rich in serine and glycine. Especially envisaged are spacers which are folded polypeptides e.g. of secondary order (e.g. helical structures) or of ternary order forming e.g. three dimensional protein domains structures which in turn ensure a certain rigidity by their constitution and preferably confer further advantageous effects such as in vivo half-life extension of the multichain multitargeting bispecific molecule as a therapeutic agent. Typical domain structures comprise hydrophobic cores with hydrophilic surfaces. In the context of the present invention, proteins having a structure of a globular protein are preferred as spacers. Globular proteins are understood in the context of the present invention to be spherical (“globe-like”) proteins and are one of the common protein types. Globular proteins in the context of the present invention may be characterized by a globin fold. Spacers comprising an Fc domain or parts or a multiple thereof, a PD-1 or an HSA domain are in particular envisaged. Also envisaged are spacers which comprise combinations of different globular proteins or parts thereof, which even more preferably comprise a Fc receptor binding function in order to increase the half-life of the molecule according to the present invention. The format described herein with the separation of the two bispecific entities has distinctive advantages. If only one target is present which is addressed by the first binding domain, then the first domain “uses” only the second domain to engage a T cell but not the fourth domain, or alternatively, the third domain uses the fourth but not the second (or to a much lesser extend due to the spacer). If only one target is present, the Kd of preferably low affinity CD3 binder as disclosed herein prevents efficient T-cell engagement. Thus, selectivity is increased with respect to other (dual) targeting molecules.

[0173] If both targets are present, the multichain multitargeting bispecific T cell engager of the invention binds more firmly to the target cell (by avidity gain) and both low affinity CD3 binding domains of the invention such as I2L can be used to engage T cells (also by avidity gain)., for example the second domain binding to a CD3 domain on an effector T cell and the third domain binding to a target antigen are less likely to form a cytolytic synapse and therefore do not act together as a bispecific entity which would otherwise lead to less beneficial cytotoxic activity profile. This has the advantage that the first and the fourth domain are not left “useless” which would mean that the full effect of the double avidity by double binding of a target and an effector binding domain, respectively, could not be made use of. Likewise, the first domain binding to a target antigen and the fourth domain binding to a CD3 domain on an effector T cell are prevented from theoretical interaction which would eventually render the second and the third domain useless for forming a cytolytic synapse with their intended “partner domains” in their respective bispecific entities.

[0174] Typically, the advantageous avidity effect conferred by a multichain multitargeting bispecific molecule according to the present invention is indicated by a differential activity factor or “selectivity gap” between the activity of the molecule on double positive cells, i.e. a target cell which carries (i.) two different targets which combination is overexpressed on the cell type to be targeted and being associated with a particular disease and/or (ii.) one target at overexpressed levels. In either case, a molecule according to the present invention targeting two (preferably different) targets at the same time, will preferably bind to such a target cell in comparison to a non-target cell expressing either only one of two targets or the one target at lower expression levels and, in consequence, will induce a more pronounced T cell response. As it preferred for a multichain multitargeting bispecific molecule of the present invention, the activity in terms of increased cytotoxicity as determined, for example, by lower EC₅₀ values, is at least 5 times, preferably 10, more preferably 30, 50, 80 or even 100 times larger on target cells (e.g. characterized by expressing both different targets or the one target at high levels) than on non-target cells (e.g. characterized by expressing only one of two targets or the one target only at low levels). Said selectivity gap in the context of the present invention is preferably larger than 100 times. It is envisaged in the context of the present invention that the selectivity gap (which can also be defined as activity gap) is at least 250, 500, 750 or even 1000 times which greatly improves efficacy and safety of the present multichain multitargeting bispecific molecule in comparison to monotargeting bispecific molecules of various formats.

[0175] A further aspect envisaged in the context of the present invention is the further support of the double avidity effect conferred by the format of the multichain multitargeting antigen-binding molecule by means of a low affinity, preferably both of the target antigen binders and the CD3 effector binders. In the context of the present invention, a CD3 binder with an affinity below KID 1.2×10⁻⁸ M is preferred. Especially preferred are CD3 binders which have an activity which is 10 times lower, more preferably 50 times lower or even more preferred 100 times lower than that of a CD3 binder having a KID 1.2×10⁻⁸. Without wanting to be bound be theory, the avidity effect is contemplated to be more pronounced when two binders with relatively balanced, i.e. typically two low to medium high, preferably low affinity binders bind to two targets on the same target cell compared to binders with mixed or, typically, higher affinity which would trigger cytolytic activity also if only one target on a cell was bound which could, for example, be a physiologic non-target cell which should not be targeted in order to avoid off-target toxicity and related side effects.

[0176] Accordingly, the multichain multitargeting bispecific antigen-binding molecules according to the present invention which bind to two (preferably different) targets on a target cell in order to show significant cytotoxic activity preferably do show less side effects than monotargeting bispecific antigen-binding molecules which bring together effector T cell and target cell. This is demonstrated, for example, by a significant reduction in release of key cytokines IL-2, IL-6, IL-10, TNFα and IFNg which are an indicator for side effects on a clinical stage. For example, release of IL-6 is typically reduced upon use of a multichain multitargeting bispecific antigen-binding molecule according to the present invention with respect to a corresponding monotargeting bispecific molecule. As it is known in the art, interleukin 6 (IL-6) seems to hold a key role in CRS pathophysiology since highly elevated IL-6 levels are seen in patients with CRS (Shimabukuro-Vornhagen et al. Journal for ImmunoTherapy of Cancer (2018) 6:56). As CRS is a serious side effect in immunotherapies, such reduction is an indication for less CRS in the clinical stage.

[0177] Further, the multichain multitargeting bispecific antigen-binding molecules according to the present invention which bind to two (preferably different) targets on a target cell in order to show significant cytotoxic activity preferably do show less side effects than monotargeting bispecific antigen-binding molecules in terms of toxicity tissue damage. It has been a surprising finding that a multispecific molecule of the format as described herein shows higher tolerability, i.e. higher doses can be administered than corresponding monotargeting bispecific molecules without clinical finings such as tissue damage examined by histopathological examination. For example, a dose of 1.5 pg/kg of a MSLN monotargeting bispecific antigen-binding molecule (SEQ ID NO: 1183) was not tolerated and resulted in mortality whereas a dose of 0.1 pg/kg was tolerated. Conversely, a multichain multitargeting CDH3-MSLN bispecific molecule (SEQ ID NO: 251) according to the present invention was tolerated at doses of up to 1000 μg/kg. Histopathological changes seen with the monotargeting molecule were generally more severe at doses of 1.5 pg/kg than those with the multichain multitargeting molecule at 1000 μg/kg, respectively. Adhesions or irreversible fibrotic changes as induced by the monotargeting molecule were absent after treatment with the multichain multitargeting molecule. Therefore, the tolerability of a multichain multitargeting molecule according to the present invention is, e.g., 600 (histopathology) to, e.g., 10.000 (tolerated dose) times higher than for a corresponding monotargeting molecule despite equivalent in vitro potency against tumor cells. Hence, the multichain multitargeting molecules of the present invention are particularly suitable in therapeutic settings, where targets are addressed which are significantly present not only on disease-associated (pathophysiological) but also or even predominately on physiological tissues which should, however, not be targeted by a cytotoxic immunotherapy. This is the case, e.g., for MSLN which is typically expressed in mesothelial cells which form the lining of several body cavities: the pleura (pleural cavity around the lungs), peritoneum (abdominopelvic cavity including the mesentery, omenta, falciform ligament and the perimetrium) and pericardium (around the heart). Addressing targets like MSLN by cytotoxic immunotherapy bears the risk of severe side effects such as intra-abdominal adhesions and/or fibrosis. Intra-abdominal adhesions are understood herein as pathologic scars formed between intra-abdominal organs. Adhesions can occur in the presence of intraperitoneal inflammation and cause peritoneal surfaces to adhere to each other. Adhesions can cause problems if the scarring limits the free movement of organs (Mutsaers S. E., Prele C. M, Pengelly, S., Herrick, S. E. Mesothelial cells and peritoneal homeostasis. Fertil Steril 2016, 106(5) 1018-1024). Fibrosis is understood herein as a common pathological outcome of several etiological conditions resulting in chronic tissue injury and is usually defined as an excessive deposition of extracellular matrix (ECM) components, leading with time to scar tissue formation and eventually organ dysfunction and failure (Maurizio Parola, Massimo Pinzani, Pathophysiology of Organ and Tissue Fibrosis, Molecular Aspects of Medicine 2019, (65) 1). Hence, the present invention also provides a method to address a disease-associated target being significantly co-expressed on a pathophysiological and one or more physiological tissues by providing a multichain multitargeting bispecific antigen-binding molecule of the format described herein, wherein the molecule addresses (i.) the target expressed both on the disease-associated and the physiological tissue and (ii.) a further target which is disease associated but not expressed on the physiological tissue under (i.), wherein the method preferably avoids the formation of intra-abdominal adhesions and/or fibrosis where such target is MSLN.

[0178] It is envisaged that the bispecific antigen-binding molecules according to the present invention have cross-reactivity to, for example, cynomolgus monkey tumor-associated antigens such as CDH3, MSLN, CD20, CD22, FLT3, CLL1, and EpCAM. It is in particular envisaged in the context of the present invention that two targets can be addressed by one multichain multitargeting bispecific antigen-binding molecule simultaneously.

[0179] Alternatively and besides the major advantage of increasing selectivity as described herein, dual targeting can mitigate lack of accessibility of one target when targeting the remaining target can trigger a sufficient residual effect. Examples are (i) the presence of soluble target which would “mask” the target on the target cell by binding the antigen-binding molecule without allowing the remaining molecule any therapeutic effect and (ii) antigen loss (lowering target expression on target cell) as the driving factor for tumor escape . . . .

[0180] For example, a multichain multitargeting antigen-binding molecule according to the present invention such as a construct directed against MSLN as TAA1 and CDH3 as TAA2 is suitable for use in the treatment, amelioration or prevention of cancer, in particular cancer selected from the group consisting of, lung carcinoma, head and neck carcinoma, a primary or secondary CNS tumor, a primary or secondary brain tumor, primary CNS lymphoma, spinal axis tumors, brain stem glioma, pituitary adenoma, adrenocortical cancer, esophagus carcinoma, colon cancer, breast cancer, ovarian cancer, NSCLC (non-small cell lung cancer), SCLC (small cell lung cancer), endometrial cancer, cervical cancer, uterine cancer, transitional cell carcinoma, bone cancer, pancreatic cancer, skin cancer, cutaneous or intraocular melanoma, hepatic cancer, biliary duct cancer, gall bladder cancer, kidney cancer, rectal cancer, cancer of the anal region, stomach cancer, gastrointestinal (gastric, colorectal, and duodenal) cancer, cancer of the small intestine, biliary tract cancer, cancer of the urethra, renal cell carcinoma, carcinoma of the endometrium, thyroid cancer, testicular cancer, cutaneous squamous cell cancer, melanoma, stomach cancer, prostate cancer, bladder cancer, osteosarcoma, mesothelioma, Hodgkin's Disease, non Hodgkins's lymphoma, chronic or acute leukemia, chronic myeloid leukemia, lymphocytic lymphomas, multiple myeloma, fibrosarcoma, neuroblastoma, retinoblastoma, and soft tissue sarcoma . . . .

[0181] It is especially envisaged in the context of the present invention that a multichain multitargeting antigen-binding molecule which preferably addresses two different target cell surface antigens thereby is very specific for its target cell and, therefore, preferably safe in its therapeutic use. Efficacy in terms of tumor growth inhibition has been demonstrated in vivo in a mouse model.

[0182] Preferred target cell surface antigens in the context of the present invention are, MSLN, CDH3, FLT3, CLL1, EpCAM, CD20, and CD22. Typically, target cell surface antigens in the context of the present invention are tumor associated antigens (TAA). B-lymphocyte antigen CD20 or CD20 is expressed on the surface of all B-cells beginning at the pro-B phase (CD45R+, CD117+) and progressively increasing in concentration until maturity. CD22, or cluster of differentiation-22, is a molecule belonging to the SIGLEC family of lectins. It is found on the surface of mature B cells and to a lesser extent on some immature B cells. Fms like tyrosine kinase 3 (FLT3) is also known as Cluster of differentiation antigen 135 (CD135), receptor-type tyrosine-protein kinase FLT3, or fetal liver kinase-2 (Flk2). FLT3 is a cytokine receptor which belongs to the receptor tyrosine kinase class III. CD135 is the receptor for the cytokine Flt3 ligand (FLT3L). The FLT3 gene is frequently mutated in acute myeloid leukemia (AML). C-type lectin-like receptor (CLL1), also known as CLEC12 Å, or as MICL. It contains an ITIM motif in cytoplasmic tail that can associate with signaling phosphatases SHP-1 and SHP-2. Human MICL is expressed as a monomer primarily on myeloid cells, including granulocytes, monocytes, macrophages and dendritic cells and is associated with AML. Mesothelin (MSLN) is a 40 kDa protein that is expressed in mesothelial cells and overexpressed in several human tumors. Cadherin-3 (CDH3), also known as P-Cadherin, is a calcium-dependent cell-cell adhesion glycoprotein composed of five extracellular cadherin repeats, a transmembrane region and a highly conserved cytoplasmic tail. It is associated with some types of tumors. Epithelial cell adhesion molecule (EpCAM) is a transmembrane glycoprotein mediating Ca2+-independent homotypic cell-cell adhesion in epithelia. EpCAM has oncogenic potential and appears to play a role in tumorigenesis and metastasis of carcinomas.

[0183] Further, it is envisaged as optionally but advantageously in the context of the present invention that the multichain multitargeting antigen-binding molecule is provided with a spacer, preferably a globular protein structure such as a scFc domain or dimerized Fc domain such as heteroFc, which also increases the molecule's half-life and enables intravenous dosing that is administrated only once every week, once every two weeks, once every three weeks or even once every four weeks, or less frequently.

[0184] In order to determine the epitope(s) of preferred multichain multitargeting antigen-binding molecules according to the present invention directed, e.g. to the CDH3, MSLN or CD20 epitope, mapping was conducted as described herein. Preferred bispecific antigen-binding molecules having a target binder for CD20 are directed to all the of the epitope cluster E1 Å, E2B and E2C. An epitope cluster is understood herein as a stretch of amino acids (as disclosed herein and defined by their position according to the Kabat) within a target (as disclosed herein and defined by their position according to the Kabat) to which target a the whole the a target binder of a multichain multitargeting bispecific antigen-binding molecule as described herein does essentially no longer bind, if said stretch of amino acid of the human target is replaced by a corresponding stretch of amino acids of the murine target. Therefore, said method of epitope clusters is understood herein as murine chimere sequence analysis. The method has been described, e.g. by Munz et al. Cancer Cell International 2010, 10:44 and was applied as described in detail in the examples with respect to CDH3 and MSLN.

[0185] The preferred epitope cluster is D4B for CDH3 as described herein and E1 for MSLN as described herein. As exemplified in the examples, selectivity gaps of multichain multitargeting bispecific antigen-minding molecules of the present invention (with respect to comparable monotargeting bispecific antigen-binding molecules) are typically even larger and, hence, more preferably, if the MSLN target binder addresses the E1 epitope cluster and if the CDH3 target binder addresses the D4B epitope cluster. While addressing other epitope clusters also leads to surprisingly high selectivity gaps and the associated advantages in terms of efficacy and tolerability/safety, selectivity gaps are especially high and, thus preferred for molecules which comprise target binders which address E1 and D4B. Such molecules comprise, for example, a molecule with a MSLN target binder comprising CDR H1-H3 of SEQ ID NO 774 to 776 and CDR L1-L3 of 777 to 779 (and corresponding VH and VL of 780 and 781), CDR H1-H3 of SEQ ID NO 782 to 784 and CDR L1-L3 of 785 to 787 (and corresponding VH and VL of 788 and 789), CDR H1-H3 of SEQ ID NO 806 to 808 and CDR L1-L3 of 809 to 811 (and corresponding VH and VL of 812 and 813), CDR H1-H3 of SEQ ID NO 838 to 840 and CDR L1-L3 of 841 to 843 (and corresponding VH and VL of 844 and 845), CDR H1-H3 of SEQ ID NO 862 to 864 and CDR L1-L3 of 865 to 867 (and corresponding VH and VL of 868 and 869), CDR H1-H3 of SEQ ID NO 894 to 896 and CDR L1-L3 of 897 to 899 (and corresponding VH and VL of 900 and 901), CDR H1-H3 of SEQ ID NO 950 to 952 and CDR L1-L3 of 953 to 955 (and corresponding VH and VL of 956 and 957), CDR H1-H3 of SEQ ID NO 1030 to 1032 and CDR L1-L3 of 1033 to 1035 (and corresponding VH and VL of 1036 and 1037), or CDR H1-H3 of SEQ ID NO 86 to 88 and CDR L1-L3 of 89 to 91 (and corresponding VH of 92 and VL 93 or 94). A preferred example for a CDH3 binder binding to the preferred DB4 epitope cluster comprises CDR H1-H3 of SEQ ID NO 194, 432 and 196 and CDR L1-L3 of 197 to 199 (and corresponding VH and VL of 433 and 200). Further target binder which preferably bind to the preferred epitope cluster of D4B are, e.g., identified herein as CH3 15-E11 CC and CH3 24-D7 CC.

[0186] It is particular surprising that a multichain multitargeting antigen-binding molecule according to the present invention is capable, to bind, preferably simultaneously to two different targets. Simultaneous binding has been demonstrated herein for several targets. However, this is surprising given the typically typical distance between the targets. For example, CD20 comprises two small extra cellular domains of only 6 aa and 47 aa. In contrast, CD22 comprises a 7 Ig domain long extracellular domain with 676 aa. However, despite the significantly different extracellular size and setup, a multichain multitargeting antigen-binding molecule according to the present intention may successfully address both TAAs CD20 and CD22 at the same time for the benefit of increased efficacy and less toxicity.

[0187] It is envisaged in the context of the present invention, that preferred multichain multitargeting antigen-binding molecules do not only show a favorable ratio of cytotoxicity to affinity, but additionally show sufficient stability characteristics in order to facilitate practical handling in formulating, storing and administrating said constructs. Sufficient stability is, for example, characterized by a high monomer content (i.e. non-aggregated and/or non-associated, native molecule) after standard preparation, such as at least 65% as determined by preparative size exclusion chromatography (SEC), more preferably at least 70% and even more preferably at least 75%. Also, the turbidity measured, e.g., at 340 nm as optical absorption at a concentration of 2.5 mg/ml should, preferably, be equal to or lower than 0.025, more preferably 0.020, e.g., in order to conclude to the essential absence of undesired aggregates. Advantageously, high monomer content is maintained after incubation in stress conditions such as freeze/thaw or incubation at 37 or 40° C. Even more, multichain multitargeting antigen-binding molecules according to the present invention typically have a thermal stability which is at least comparable or even higher than that of bispecific antigen-binding molecules which have only one target binding domain but otherwise comprise a CD3 binding domain and, a half-life extending scFc domain, i.e. which are structurally less complex. The skilled person would expect that a structurally more complex protein-based molecule was more prone to thermal and other degradation, i.e. be less thermal stable. However, surprisingly the contrary is the case, a multichain multitargeting bispecific antigen-binding molecule according to the present invention shows at least comparable or even better thermal stability than single chain molecules. The molecules of the invention when tested also regarding long-term storage stability and freeze-thaw stability advantageously exhibit at least comparable or even better characteristics as single chain molecules with the same binding domains. Preferably, molecules of the invention also show less monomer decrease after storage, and higher protein homogeneity than a respective single chain bispecific antigen-binding molecule, i.e. comprising the same target and CD3 binders, e.g. as disclosed herein.

[0188] In an embodiment, the present invention provides a multichain multitargeting bispecific antigen-binding molecule comprising all four such domains. In a preferred embodiment, the domains under (i.), (ii.), (iii.) and (iv.) are arranged as described in FIGS. 1, 2 and 3.

[0189] The term “polypeptide” is understood herein as an organic polymer which comprises at least one continuous, unbranched amino acid chain. In the context of the present invention, a polypeptide comprising more than one amino acid chain is likewise envisaged. An amino acid chain of a polypeptide typically comprises at least 50 amino acids, preferably at least 100, 200, 300, 400 or 500 amino acids. It is also envisaged in the context of the present invention that an amino acid chain of a polymer is linked to an entity which is not composed of amino acids.

[0190] The term “antigen-binding polypeptide” according to the present invention is preferably a polypeptide which immuno-specifically binds to its target or antigen. It typically comprises the heavy chain variable region (VH) and/or the light chain variable region (VL) of an antibody, or comprises domains derived therefrom. A polypeptide according to the invention comprises the minimum structural requirements of an antibody which allow for immuno-specific target binding. This minimum requirement may e.g. be defined by the presence of at least three light chain CDRs (i.e. CDR1, CDR2 and CDR3 of the VL region) and/or three heavy chain CDRs (i.e. CDR1, CDR2 and CDR3 of the VH region), preferably of all six CDRs. An antigen-binding molecule of the present invention is preferably a T-cell engaging polypeptide which may hence be characterized by the presence of three or six CDRs in either one or both binding domains, and the skilled person knows where (in which order) those CDRs are located within the binding domain. Preferably, an “antigen-binding molecule” is understood as an “antigen-binding polypeptide” in the context of the present invention. In an alternative embodiment, an antigen-binding polypeptide of the present invention may be an aptamer.

[0191] Alternatively, a molecule in the context of the present invention, is an antigen-binding polypeptide which corresponds to an “antibody construct” which typically refers to a molecule in which the structure and/or function is/are based on the structure and/or function of an antibody, e.g., of a full-length or whole immunoglobulin molecule. An antigen-binding molecule is hence capable of binding to its specific target or antigen and/or is/are drawn from the variable heavy chain (VH) and/or variable light chain (VL) domains of an antibody or fragment thereof. Furthermore, the domain which binds to its binding partner according to the present invention is understood herein as a binding domain of an antigen-binding molecule according to the invention. Typically, a binding domain according to the present invention comprises the minimum structural requirements of an antibody which allow for the target binding. This minimum requirement may e.g. be defined by the presence of at least the three light chain CDRs (i.e. CDR1, CDR2 and CDR3 of the VL region) and/or the three heavy chain CDRs (i.e. CDR1, CDR2 and CDR3 of the VH region), preferably of all six CDRs. An alternative approach to define the minimal structure requirements of an antibody is the definition of the epitope of the antibody within the structure of the specific target, respectively, the protein domain of the target protein composing the epitope region (epitope cluster) or by reference to a specific antibody competing with the epitope of the defined antibody. The antibodies on which the constructs according to the invention are based include for example monoclonal, recombinant, chimeric, deimmunized, humanized and human antibodies.

[0192] In the context of the present invention, a polypeptide of the present invention binds to its respective target structure in a particular manner. Preferably, a polypeptide according to the present invention comprises one paratope per binding domain which specifically or immuno-specifically binds to”, “(specifically or immuno-specifically) recognizes”, or “(specifically or immuno-specifically) reacts with” its respective target structure. This means in accordance with this invention that a polypeptide or a binding domain thereof interacts or (immuno-)specifically interacts with a given epitope on the target molecule (antigen) and CD3, respectively. This interaction or association occurs more frequently, more rapidly, with greater duration, with greater affinity, or with some combination of these parameters, to an epitope on the specific target than to alternative substances (non-target molecules). Because of the sequence similarity between homologous proteins in different species, a binding domain that (immuno-) specifically binds to its target (such as a human target) may, however, cross-react with homologous target molecules from different species (such as, from non-human primates). The term “specific/immuno-specific binding” can hence include the binding of a binding domain to epitopes and/or structurally related epitopes in more than one species. The term “(immuno-) selectively binds” does exclude the binding to structurally related epitopes.

[0193] The binding domain of an antigen-binding molecule according to the invention may e.g. comprise the above referred groups of CDRs. Preferably, those CDRs are comprised in the framework of an antibody light chain variable region (VL) and an antibody heavy chain variable region (VH); however, it does not have to comprise both. Fd fragments, for example, have two VH regions and often retain some antigen-binding function of the intact antigen-binding domain. Additional examples for the format of antibody fragments, antibody variants or binding domains include (1) a Fab fragment, a monovalent fragment having the VL, VH, CL and CH1 domains; (2) a F(ab′)₂ fragment, a bivalent fragment having two Fab fragments linked by a disulfide bridge at the hinge region; (3) an Fd fragment having the two VH and CH1 domains; (4) an Fv fragment having the VL and VH domains of a single arm of an antibody, (5) a dAb fragment (Ward et al., (1989) Nature 341:544-546), which has a VH domain; (6) an isolated complementarity determining region (CDR), and (7) a single chain Fv (scFv), the latter being preferred (for example, derived from an scFV-library). Examples for embodiments of antigen-binding molecules according to the invention are e.g. described in WO 00/006605, WO 2005/040220, WO 2008/119567, WO 2010/037838, WO 2013/026837, WO 2013/026833, US 2014/0308285, US 2014/0302037, WO 2014/144722, WO 2014/151910, and WO 2015/048272.

[0194] Also, within the definition of “binding domain” or “domain which binds” are fragments of full-length antibodies, such as VH, VHH, VL, (s)dAb, Fv, Fd, Fab, Fab′, F(ab′)2 or “r IgG” (“half antibody”). Antigen-binding molecules according to the invention may also comprise modified fragments of antibodies, also called antibody variants, such as scFv, di-scFv or bi(s)-scFv, scFv-Fc, scFv-zipper, scFab, Fab₂, Fab₃, diabodies, single chain diabodies, tandem diabodies (Tandab's), tandem di-scFv, tandem tri-scFv, “multibodies” such as triabodies or tetrabodies, and single domain antibodies such as nanobodies or single variable domain antibodies comprising merely one variable domain, which may be VHH, VH or VL, that specifically bind an antigen or epitope independently of other V regions or domains. Typically, a binding domain of the present invention comprises a paratope which facilitates the binding to its binding partner.

[0195] As used herein, the terms “single-chain Fv,” “single-chain antibodies” or “scFv” refer to single polypeptide chain antibody fragments that comprise the variable regions from both the heavy and light chains, but lack the constant regions. Generally, a single-chain antibody further comprises a polypeptide linker between the VH and VL domains which enables it to form the desired structure which would allow for antigen binding. Single chain antibodies are discussed in detail by Pluckthun in The Pharmacology of Monoclonal Antibodies, vol. 113, Rosenburg and Moore eds. Springer-Verlag, New York, pp. 269-315 (1994). Various methods of generating single chain antibodies are known, including those described in U.S. Pat. Nos. 4,694,778 and 5,260,203; International Patent Application Publication No. WO 88/01649; Bird (1988) Science 242:423-442; Huston et al. (1988) Proc. Natl. Acad. Sci. USA 85:5879-5883; Ward et al. (1989) Nature 334:54454; Skerra et al. (1988) Science 242:1038-1041. In specific embodiments, single-chain antibodies can also be bispecific, multispecific, human, and/or humanized and/or synthetic.

[0196] In the context of the present invention, a paratope is understood as an antigen-binding site which is a part of a polypeptide as described herein and which recognizes and binds to an antigen. A paratope is typically a small region of about at least 5 amino acids. A paratope as understood herein typically comprises parts of antibody-derived heavy (VH) and light chain (VL) sequences. Each binding domain of a molecule according to the present invention is provided with a paratope comprising a set of 6 complementarity-determining regions (CDR loops) with three of each being comprised within the antibody-derived VH and VL sequence, respectively.

[0197] Furthermore, the definition of the term “antigen-binding molecule” includes preferably polyvalent/multivalent constructs and, thus, bispecific molecules, wherein bispecific means that they specifically bind to two cell types comprising distinctive antigenic structures, i.e. target cell(s) and effector cell(s). As the antigen-binding molecules of the present invention are preferably multichain multitargeting, they are typically as well as polyvalent/multivalent molecules, i.e. they specifically bind more than two antigenic structures, preferably four distinct binding domains in the context of the present invention which are two target binding domains and two CD3 binding domains. The term “multichain multitargeting bispecific antigen-binding molecule” comprises the terms “multichain multitargeting bispecific T-cell engager molecule” and “multichain multitargeting bispecific T-cell engager polypeptide (MMBiTEP)”. A preferred “multichain multitargeting bispecific antigen-binding molecule” is a “multichain multitargeting bispecific T-cell engager molecule” or a “multichain multitargeting bispecific T-cell engager polypeptide (MMBiTEP)”. The term multichain multitargeting bispecific T-cell engager molecule” is understood to comprise the term “multichain multitargeting bispecific T-cell engager polypeptid. Moreover, the definition of the term “antigen-binding molecule” includes molecules comprising only one polypeptide chain as well as molecules consisting of more than one polypeptide chain, which chains can be either identical (homodimers, homotrimers or homo oligomers) or different (heterodimer, heterotrimer or heterooligomer). Such molecules comprising more than one polypeptide chain, i.e. typically two chains, have these chains typically attached to each other as heterodimers via charged pair binding, e.g. within a heteroFc entity which serves as a spacer and half-life extending moiety in between the two bispecific entities as described herein. Examples for the above identified antigen-binding molecules, e.g. antibody-based molecules and variants or derivatives thereof are described inter alia in Harlow and Lane, Antibodies a laboratory manual, CSHL Press (1988) and Using Antibodies: a laboratory manual, CSHL Press (1999), Kontermann and Dubel, Antibody Engineering, Springer, 2nd ed. 2010 and Little, Recombinant Antibodies for Immunotherapy, Cambridge University Press 2009.

[0198] The term “bispecific” as used herein refers to an antigen-binding molecule which is “at least bispecific”, i.e., it addresses two different cell types, i.e. target and effector cells, and comprises at least a first and third binding domain and a second and fourth binding domain, wherein at least two binding domains bind to two antigens or targets selected preferably from CD20, CD22, FLT3, MSLN, CDH3, CLL1 and EpCAM, and the other two binding domains of the same molecule bind to another antigen (here: CD3) on an effector cell, typically on a T cell. Accordingly, antigen-binding molecules according to the invention comprise specificities for at least two different antigens or targets. For example, two domains do preferably not bind to an extracellular epitope of CD3ε of one or more of the species as described herein.

[0199] The term “target cell surface antigen” refers to an antigenic structure expressed by a cell and which is present at the cell surface such that it is accessible for an antigen-binding molecule as described herein. A preferred target cell surface antigen in the context of the present invention is a tumor associated antigen (TAA). It may be a protein, preferably the extracellular portion of a protein, or a carbohydrate structure, preferably a carbohydrate structure of a protein, such as a glycoprotein. It is preferably a tumor antigen. The term “bispecific antigen-binding molecule” of the invention also encompasses bispecific multichain multitargeting antigen-binding molecules such as tritargeting antigen-binding molecules, the latter ones including three binding domains, or constructs having more than three (e.g. four, five . . . ) specificities.

[0200] Preferred in the context of the present invention is a molecule which is “multitargeting”, which is understood herein to be “at least targeting two targets (e.g. TAAs) per molecule of the invention typically per target cell”. In this regard, a multitargeting molecule such as an antigen-binding molecule is specific for two—typically identical—effector structures on an effector cell such as CD3, more preferably CD3εpsilon (CD3ε, which is comprised whenever reference is made to the “CD3” in the present invention), and at least two target cell surface antigens. Said specificity is conferred by respective binding domains as defined herein. Typically, “multitargeting” refers to a molecule which is specific for at least two (preferably different) target cell surface antigens (e.g. TAAs) which confers preferred properties of a multitargeting antigen-binding molecule according to the present invention, namely mitigation of antigen loss and increase of selectivity, i.e. selectivity for killing target cells which co-express the targets for which the molecule of the invention has binding domains and which target cells are associated with a disease. Thereby, the therapeutic window of the molecule of the invention is increased with respect to monotargeting bispecific molecules which typically leads to higher drug tolerability as demonstrated herein.

[0201] A T-cell engaging antigen-binding molecule, e.g. a multichain polypeptide, according to the present invention is preferably bispecific which is understood herein to typically comprise one domain binding to at least one target antigen and another domain binding to CD3. Hence, it does not occur naturally, and it is markedly different in its function from naturally occurring products. A polypeptide in accordance with the invention is hence an artificial “hybrid” polypeptide comprising at least two distinct binding domains with different specificities and is, thus, bispecific. Bispecific antigen-binding molecules can be produced by a variety of methods including fusion of hybridomas or linking of Fab′ fragments. See, e.g., Songsivilai & Lachmann, Clin. Exp. Immunol. 79:315-321 (1990).

[0202] The at least four binding domains and the variable domains (VH/VL) of the antigen-binding molecule of the present invention typically comprise peptide linkers (spacer peptides). The term “peptide linker” comprises in accordance with the present invention an amino acid sequence by which the amino acid sequences of one (variable and/or binding) domain and another (variable and/or binding) domain of the antigen-binding molecule of the invention are linked with each other. The peptide linker between the first and the second binding domain and the third and the fourth domain, wherein the first and the third domain are preferably capable to bind simultaneously to two targets, which are preferably different targets (e.g. TAA1 and TAA2) preferably on the same cell, are preferably flexible and of limited length, e.g. of 5, 6, 7,8,9, 10, 11, 12, 13, 14, 15, 16,17 or 18 amino acids. The peptide linkers can also be used to fuse the spacer to the other domains of the antigen-binding molecule of the invention. An essential technical feature of such peptide linker is that it does not comprise any polymerization activity. Among the suitable peptide linkers are those described in U.S. Pat. Nos. 4,751,180 and 4,935,233 or WO 88/09344. The peptide linkers can also be used to attach other domains or modules or regions (such as half-life extending domains) to the antigen-binding molecule of the invention. However, typically the linker between the first and the second target binding domain differs from the intra-binder linker which links the VH and VL within the target binding domain. Said difference is the linker between the fist and the second binding domain having one amino acid more than intra-binder linkers, e.g. six and five amino acids, respectively, such as SGGGGS versus GGGGS. This confers surprisingly flexibility and stability at the same time in the specific antigen-binding molecule format as described herein. The spacer (or synonymously spacer entity) between the two bispecific entities as described herein is a specific embodiment of a linker because a spacer also functions as a linker because it contributes to linking the two bispecific entities to preferably build at least one continuous polypeptide chain comprising the four binding domains or parts thereof. However, in addition, the spacer functions as an entity which spaces the two bispecific entities sterically apart. Accordingly, a spacer in the context of the present invention is a specific embodiment of a linker which—together with two further short and flexible linkers on each end—contributes to linking the two binding domains (of two different bispecific entities) but first and foremost spaces them apart in such a way that the two bispecific entities can advantageously act as described herein, e.g. show a surprisingly high selectivity gap.

[0203] The antigen-binding molecules of the present invention are preferably “in vitro generated antigen-binding molecules”. This term refers to an antigen-binding molecule according to the above definition where all or part of the variable region (e.g., at least one CDR) is generated in a non-immune cell selection, e.g., an in vitro phage display, protein chip or any other method in which candidate sequences can be tested for their ability to bind to an antigen. This term thus preferably excludes sequences generated solely by genomic rearrangement in an immune cell in an animal. A “recombinant antibody” is an antibody made through the use of recombinant DNA technology or genetic engineering.

[0204] The term “monoclonal antibody” (mAb) or monoclonal antibody from which an antigen-binding molecule as used herein is derived refers to an antibody obtained from a population of substantially homogeneous antibodies, i.e., the individual antibodies comprising the population are identical except for possible naturally occurring mutations and/or post-translation modifications (e.g., isomerizations, amidations) that may be present in minor amounts. Monoclonal antibodies are highly specific, being directed against a single antigenic side or determinant on the antigen, in contrast to conventional (polyclonal) antibody preparations which typically include different antibodies directed against different determinants (or epitopes). In addition to their specificity, the monoclonal antibodies are advantageous in that they are synthesized by the hybridoma culture, hence uncontaminated by other immunoglobulins. The modifier “monoclonal” indicates the character of the antibody as being obtained from a substantially homogeneous population of antibodies, and is not to be construed as requiring production of the antibody by any particular method.

[0205] For the preparation of monoclonal antibodies, any technique providing antibodies produced by continuous cell line cultures can be used. For example, monoclonal antibodies to be used may be made by the hybridoma method first described by Koehler et al., Nature, 256:495 (1975), or may be made by recombinant DNA methods (see, e.g., U.S. Pat. No. 4,816,567). Examples for further techniques to produce human monoclonal antibodies include the trioma technique, the human B-cell hybridoma technique (Kozbor, Immunology Today 4 (1983), 72) and the EBV-hybridoma technique (Cole et al., Monoclonal Antibodies and Cancer Therapy, Alan R. Liss, Inc. (1985), 77-96).

[0206] Hybridomas can then be screened using standard methods, such as enzyme-linked immunosorbent assay (ELISA) and surface plasmon resonance analysis, e.g. Biacore™ to identify one or more hybridomas that produce an antibody that specifically binds with a specified antigen. Any form of the relevant antigen may be used as the immunogen, e.g., recombinant antigen, naturally occurring forms, any variants or fragments thereof, as well as an antigenic peptide thereof. Surface plasmon resonance as employed in the Biacore system can be used to increase the efficiency of phage antibodies which bind to an epitope of a target cell surface antigen (Schier, Human Antibodies Hybridomas 7 (1996), 97-105; Malmborg, J. Immunol. Methods 183 (1995), 7-13).

[0207] Another exemplary method of making monoclonal antibodies includes screening protein expression libraries, e.g., phage display or ribosome display libraries. Phage display is described, for example, in Ladner et al., U.S. Pat. No. 5,223,409; Smith (1985) Science 228:1315-1317, Clackson et al., Nature, 352: 624-628 (1991) and Marks et al., J. Mol. Biol., 222: 581-597 (1991).

[0208] In addition to the use of display libraries, the relevant antigen can be used to immunize a non-human animal, e.g., a rodent (such as a mouse, hamster, rabbit or rat). In one embodiment, the non-human animal includes at least a part of a human immunoglobulin gene. For example, it is possible to engineer mouse strains deficient in mouse antibody production with large fragments of the human Ig (immunoglobulin) loci. Using the hybridoma technology, antigen-specific monoclonal antibodies derived from the genes with the desired specificity may be produced and selected. See, e.g., XENOMOUSE™, Green et al. (1994) Nature Genetics 7:13-21, US 2003-0070185, WO 96/34096, and WO 96/33735.

[0209] A monoclonal antibody can also be obtained from a non-human animal, and then modified, e.g., humanized, deimmunized, rendered chimeric etc., using recombinant DNA techniques known in the art. Examples of modified antigen-binding molecules include humanized variants of non-human antibodies, “affinity matured” antibodies (see, e.g. Hawkins et al. J. Mol. Biol. 254, 889-896 (1992) and Lowman et al., Biochemistry 30, 10832-10837 (1991)) and antibody mutants with altered effector function(s) (see, e.g., U.S. Pat. No. 5,648,260, Kontermann and Dubel (2010), loc. cit. and Little (2009), loc. cit.).

[0210] In immunology, affinity maturation is the process by which B cells produce antibodies with increased affinity for antigen during the course of an immune response. With repeated exposures to the same antigen, a host will produce antibodies of successively greater affinities. Like the natural prototype, the in vitro affinity maturation is based on the principles of mutation and selection. The in vitro affinity maturation has successfully been used to optimize antibodies, antigen-binding molecules, and antibody fragments. Random mutations inside the CDRs are introduced using radiation, chemical mutagens or error-prone PCR. In addition, the genetic diversity can be increased by chain shuffling. Two or three rounds of mutation and selection using display methods like phage display usually results in antibody fragments with affinities in the low nanomolar range.

[0211] A preferred type of an amino acid substitutional variation of the antigen-binding molecules involves substituting one or more hypervariable region residues of a parent antibody (e.g. a humanized or human antibody). Generally, the resulting variant(s) selected for further development will have improved biological properties relative to the parent antibody from which they are generated. A convenient way for generating such substitutional variants involves affinity maturation using phage display. Briefly, several hypervariable region sides (e.g. 6-7 sides) are mutated to generate all possible amino acid substitutions at each side. The antibody variants thus generated are displayed in a monovalent fashion from filamentous phage particles as fusions to the gene III product of M13 packaged within each particle. The phage-displayed variants are then screened for their biological activity (e.g. binding affinity) as herein disclosed. In order to identify candidate hypervariable region sides for modification, alanine scanning mutagenesis can be performed to identify hypervariable region residues contributing significantly to antigen binding. Alternatively, or additionally, it may be beneficial to analyze a crystal structure of the antigen-antibody complex to identify contact points between the binding domain and, e.g., human CS1, BCMA, CD20, CD22, FLT3, CD123, CDH3, MSLN, CLL1 or EpCAM. Such contact residues and neighbouring residues are candidates for substitution according to the techniques elaborated herein. Once such variants are generated, the panel of variants is subjected to screening as described herein and antibodies with superior properties in one or more relevant assays may be selected for further development.

[0212] The monoclonal antibodies and antigen-binding molecules of the present invention specifically include “chimeric” antibodies (immunoglobulins) in which a portion of the heavy and/or light chain is identical with or homologous to corresponding sequences in antibodies derived from a particular species or belonging to a particular antibody class or subclass, while the remainder of the chain(s) is/are identical with or homologous to corresponding sequences in antibodies derived from another species or belonging to another antibody class or subclass, as well as fragments of such antibodies, so long as they exhibit the desired biological activity (U.S. Pat. No. 4,816,567; Morrison et al., Proc. Natl. Acad. Sci. USA, 81: 6851-6855 (1984)). Chimeric antibodies of interest herein include “primitized” antibodies comprising variable domain antigen-binding sequences derived from a non-human primate (e.g., Old World Monkey, Ape etc.) and human constant region sequences. A variety of approaches for making chimeric antibodies have been described. See e.g., Morrison et al., Proc. Natl. Acad. ScL U.S.A. 81:6851, 1985; Takeda et al., Nature 314:452, 1985, Cabilly et al., U.S. Pat. No. 4,816,567; Boss et al., U.S. Pat. No. 4,816,397; Tanaguchi et al., EP 0171496; EP 0173494; and GB 2177096.

[0213] An antibody, antigen-binding molecule, antibody fragment or antibody variant may also be modified by specific deletion of human T cell epitopes (a method called “deimmunization”) by the methods disclosed for example in WO 98/52976 or WO 00/34317. Briefly, the heavy and light chain variable domains of an antibody can be analyzed for peptides that bind to MHC class II; these peptides represent potential T cell epitopes (as defined in WO 98/52976 and WO 00/34317). For detection of potential T cell epitopes, a computer modeling approach termed “peptide threading” can be applied, and in addition a database of human MHC class II binding peptides can be searched for motifs present in the VH and VL sequences, as described in WO 98/52976 and WO 00/34317. These motifs bind to any of the 18 major MHC class II DR allotypes, and thus constitute potential T cell epitopes. Potential T cell epitopes detected can be eliminated by substituting small numbers of amino acid residues in the variable domains, or preferably, by single amino acid substitutions. Typically, conservative substitutions are made. Often, but not exclusively, an amino acid common to a position in human germline antibody sequences may be used. Human germline sequences are disclosed e.g. in Tomlinson, et al. (1992) J. MoI. Biol. 227:776-798; Cook, G. P. et al. (1995) Immunol. Today Vol. 16 (5): 237-242; and Tomlinson et al. (1995) EMBO J. 14:14:4628-4638. The V BASE directory provides a comprehensive directory of human immunoglobulin variable region sequences (compiled by Tomlinson, LA. et al. MRC Centre for Protein Engineering, Cambridge, UK). These sequences can be used as a source of human sequence, e.g., for framework regions and CDRs. Consensus human framework regions can also be used, for example as described in U.S. Pat. No. 6,300,064.

[0214] “Humanized” antibodies, antigen-binding molecules, variants or fragments thereof (such as Fv, Fab, Fab′, F(ab′)2 or other antigen-binding subsequences of antibodies) are antibodies or immunoglobulins of mostly human sequences, which contain (a) minimal sequence(s) derived from non-human immunoglobulin. For the most part, humanized antibodies are human immunoglobulins (recipient antibody) in which residues from a hypervariable region (also CDR) of the recipient are replaced by residues from a hypervariable region of a non-human (e.g., rodent) species (donor antibody) such as mouse, rat, hamster or rabbit having the desired specificity, affinity, and capacity. In some instances, Fv framework region (FR) residues of the human immunoglobulin are replaced by corresponding non-human residues. Furthermore, “humanized antibodies” as used herein may also comprise residues which are found neither in the recipient antibody nor the donor antibody. These modifications are made to further refine and optimize antibody performance. The humanized antibody may also comprise at least a portion of an immunoglobulin constant region (Fc), typically that of a human immunoglobulin. For further details, see Jones et al., Nature, 321: 522-525 (1986); Reichmann et al., Nature, 332: 323-329 (1988); and Presta, Curr. Op. Struct. Biol., 2: 593-596 (1992).

[0215] Humanized antibodies or fragments thereof can be generated by replacing sequences of the Fv variable domain that are not directly involved in antigen binding with equivalent sequences from human Fv variable domains. Exemplary methods for generating humanized antibodies or fragments thereof are provided by Morrison (1985) Science 229:1202-1207; by Oi et al. (1986) BioTechniques 4:214; and by U.S. Pat. Nos. 5,585,089; 5,693,761; 5,693,762; 5,859,205; and 6,407,213. Those methods include isolating, manipulating, and expressing the nucleic acid sequences that encode all or part of immunoglobulin Fv variable domains from at least one of a heavy or light chain. Such nucleic acids may be obtained from a hybridoma producing an antibody against a predetermined target, as described above, as well as from other sources. The recombinant DNA encoding the humanized antibody molecule can then be cloned into an appropriate expression vector.

[0216] Humanized antibodies may also be produced using transgenic animals such as mice that express human heavy and light chain genes, but are incapable of expressing the endogenous mouse immunoglobulin heavy and light chain genes. Winter describes an exemplary CDR grafting method that may be used to prepare the humanized antibodies described herein (U.S. Pat. No. 5,225,539). All of the CDRs of a particular human antibody may be replaced with at least a portion of a non-human CDR, or only some of the CDRs may be replaced with non-human CDRs. It is only necessary to replace the number of CDRs required for binding of the humanized antibody to a predetermined antigen.

[0217] A humanized antibody can be optimized by the introduction of conservative substitutions, consensus sequence substitutions, germline substitutions and/or back mutations. Such altered immunoglobulin molecules can be made by any of several techniques known in the art, (e.g., Teng et al., Proc. Natl. Acad. Sci. U.S.A., 80: 7308-7312, 1983; Kozbor et al., Immunology Today, 4:7279, 1983; Olsson et al., Meth. Enzymol., 92: 3-16, 1982, and EP 239 400).

[0218] The term “human antibody”, “human antigen-binding molecule” and “human binding domain” includes antibodies, antigen-binding molecules and binding domains having antibody regions such as variable and constant regions or domains which correspond substantially to human germline immunoglobulin sequences known in the art, including, for example, those described by Kabat et al. (1991) (loc. cit.). The human antibodies, antigen-binding molecules or binding domains of the invention may include amino acid residues not encoded by human germline immunoglobulin sequences (e.g., mutations introduced by random or side-specific mutagenesis in vitro or by somatic mutation in vivo), for example in the CDRs, and in particular, in CDR3. The human antibodies, antigen-binding molecules or binding domains can have at least one, two, three, four, five, or more positions replaced with an amino acid residue that is not encoded by the human germline immunoglobulin sequence. The definition of human antibodies, antigen-binding molecules and binding domains as used herein also contemplates fully human antibodies, which include only non-artificially and/or genetically altered human sequences of antibodies as those can be derived by using technologies or systems such as the Xenomouse. Preferably, a “fully human antibody” does not include amino acid residues not encoded by human germline immunoglobulin sequences.

[0219] In some embodiments, the antigen-binding molecules of the invention are “isolated” or “substantially pure” antigen-binding molecules. “Isolated” or “substantially pure”, when used to describe the antigen-binding molecules disclosed herein, means an antigen-binding molecule that has been identified, separated and/or recovered from a component of its production environment. Preferably, the antigen-binding molecule is free or substantially free of association with all other components from its production environment. Contaminant components of its production environment, such as that resulting from recombinant transfected cells, are materials that would typically interfere with diagnostic or therapeutic uses for the polypeptide, and may include enzymes, hormones, and other proteinaceous or non-proteinaceous solutes. The antigen-binding molecules may e.g. constitute at least about 5%, or at least about 50% by weight of the total protein in a given sample. It is understood that the isolated protein may constitute from 5% to 99.9% by weight of the total protein content, depending on the circumstances. The polypeptide may be made at a significantly higher concentration through the use of an inducible promoter or high expression promoter, such that it is made at increased concentration levels. The definition includes the production of an antigen-binding molecule in a wide variety of organisms and/or host cells that are known in the art. In preferred embodiments, the antigen-binding molecule will be purified (1) to a degree sufficient to obtain at least 15 residues of N-terminal or internal amino acid sequence by use of a spinning cup sequenator, or (2) to homogeneity by SDS-PAGE under non-reducing or reducing conditions using Coomassie blue or, preferably, silver stain. Ordinarily, however, an isolated antigen-binding molecule will be prepared by at least one purification step.

[0220] The term “binding domain” characterizes in connection with the present invention a domain which (specifically) binds to/interacts with/recognizes a given target epitope or a given target side on the target molecules (antigens), e.g. CST, BCMA, CD20, CD22, FLT3, CD123, CLL1, MSLN, or EpCAM, and CD3, respectively. The structure and function of the typically first and third or second and fourth binding domain (recognizing e.g. CST, BCMA, CD20, CD22, FLT3, CD123, CLL1, MSLN, or EpCAM), and preferably also the structure and/or function of the effector binding domain (typically the second and fourth or first and third binding domain recognizing CD3), is/are based on the structure and/or function of an antibody, e.g. of a full-length or whole immunoglobulin molecule, and/or is/are drawn from the variable heavy chain (VH) and/or variable light chain (VL) domains of an antibody or fragment thereof. Preferably the target cell surface antigen(s) binding domain(s) is/are characterized by the presence of three light chain CDRs (i.e. CDR1, CDR2 and CDR3 of the VL region) and/or three heavy chain CDRs (i.e. CDR1, CDR2 and CDR3 of the VH region). The effector (typically CD3) binding domain preferably also comprises the minimum structural requirements of an antibody which allow for the target binding. More preferably, the second binding domain comprises at least three light chain CDRs (i.e. CDR1, CDR2 and CDR3 of the VL region) and/or three heavy chain CDRs (i.e. CDR1, CDR2 and CDR3 of the VH region). It is envisaged that the first and/or second binding domain is produced by or obtainable by phage-display or library screening methods rather than by grafting CDR sequences from a pre-existing (monoclonal) antibody into a scaffold.

[0221] According to the present invention, binding domains are in the form of one or more polypeptides. Such polypeptides may include proteinaceous parts and non-proteinaceous parts (e.g. chemical linkers or chemical cross-linking agents such as glutaraldehyde). Proteins (including fragments thereof, preferably biologically active fragments, and peptides, usually having less than 30 amino acids) comprise two or more amino acids coupled to each other via a covalent peptide bond (resulting in a chain of amino acids).

[0222] The term “polypeptide” as used herein describes a group of molecules, which usually consist of more than 30 amino acids. Polypeptides may further form multimers such as dimers, trimers and higher oligomers, i.e., consisting of more than one polypeptide molecule. Polypeptide molecules forming such dimers, trimers etc. may be identical or non-identical. The corresponding higher order structures of such multimers are, consequently, termed homo- or heterodimers, homo- or heterotrimers etc. An example for a heteromultimer is an antibody molecule, which, in its naturally occurring form, consists of two identical light polypeptide chains and two identical heavy polypeptide chains. The terms “peptide”, “polypeptide” and “protein” also refer to naturally modified peptides/polypeptides/proteins wherein the modification is effected e.g. by post-translational modifications like glycosylation, acetylation, phosphorylation and the like. A “peptide”, “polypeptide” or “protein” when referred to herein may also be chemically modified such as pegylated. Such modifications are well known in the art and described herein below.

[0223] Preferably the binding domains which binds to any of CS1, BCMA, CD20, CD22, FLT3, CD123, CLL1, CDH3, MSLN, and EpCAM, and/or the binding domains which binds to CD3ε is/are human binding domains. Antibodies and antigen-binding molecules comprising at least one human binding domain avoid some of the problems associated with antibodies or antigen-binding molecules that possess non-human such as rodent (e.g. murine, rat, hamster or rabbit) variable and/or constant regions. The presence of such rodent derived proteins can lead to the rapid clearance of the antibodies or antigen-binding molecules or can lead to the generation of an immune response against the antibody or antigen-binding molecule by a patient. In order to avoid the use of rodent derived antibodies or antigen-binding molecules, human or fully human antibodies/antigen-binding molecules can be generated through the introduction of human antibody function into a rodent so that the rodent produces fully human antibodies.

[0224] The ability to clone and reconstruct megabase-sized human loci in yeast artificial chromosomes YACs and to introduce them into the mouse germline provides a powerful approach to elucidating the functional components of very large or crudely mapped loci as well as generating useful models of human disease. Furthermore, the use of such technology for substitution of mouse loci with their human equivalents could provide unique insights into the expression and regulation of human gene products during development, their communication with other systems, and their involvement in disease induction and progression.

[0225] An important practical application of such a strategy is the “humanization” of the mouse humoral immune system. Introduction of human immunoglobulin (Ig) loci into mice in which the endogenous Ig genes have been inactivated offers the opportunity to study the mechanisms underlying programmed expression and assembly of antibodies as well as their role in B-cell development. Furthermore, such a strategy could provide an ideal source for production of fully human monoclonal antibodies (mAbs)—an important milestone towards fulfilling the promise of antibody therapy in human disease. Fully human antibodies or antigen-binding molecules are expected to minimize the immunogenic and allergic responses intrinsic to mouse or mouse-derivatized mAbs and thus to increase the efficacy and safety of the administered antibodies/antigen-binding molecules. The use of fully human antibodies or antigen-binding molecules can be expected to provide a substantial advantage in the treatment of chronic and recurring human diseases, such as inflammation, autoimmunity, and cancer, which require repeated compound administrations.

[0226] One approach towards this goal was to engineer mouse strains deficient in mouse antibody production with large fragments of the human Ig loci in anticipation that such mice would produce a large repertoire of human antibodies in the absence of mouse antibodies. Large human Ig fragments would preserve the large variable gene diversity as well as the proper regulation of antibody production and expression. By exploiting the mouse machinery for antibody diversification and selection and the lack of immunological tolerance to human proteins, the reproduced human antibody repertoire in these mouse strains should yield high affinity antibodies against any antigen of interest, including human antigens. Using the hybridoma technology, antigen-specific human mAbs with the desired specificity could be readily produced and selected. This general strategy was demonstrated in connection with the generation of the first XenoMouse mouse strains (see Green et al. Nature Genetics 7:13-21 (1994)). The XenoMouse strains were engineered with YACs containing 245 kb and 190 kb-sized germline configuration fragments of the human heavy chain locus and kappa light chain locus, respectively, which contained core variable and constant region sequences. The human Ig containing YACs proved to be compatible with the mouse system for both rearrangement and expression of antibodies and were capable of substituting for the inactivated mouse Ig genes. This was demonstrated by their ability to induce B cell development, to produce an adult-like human repertoire of fully human antibodies, and to generate antigen-specific human mAbs. These results also suggested that introduction of larger portions of the human Ig loci containing greater numbers of V genes, additional regulatory elements, and human Ig constant regions may recapitulate substantially the full repertoire that is characteristic of the human humoral response to infection and immunization. The work of Green et al. was recently extended to the introduction of greater than approximately 80% of the human antibody repertoire through introduction of megabase sized, germline configuration YAC fragments of the human heavy chain loci and kappa light chain loci, respectively. See Mendez et al. Nature Genetics 15:146-156 (1997) and U.S. patent application Ser. No. 08/759,620.

[0227] The production of the XenoMouseanimals is further discussed and delineated in U.S. patent application Ser. No. 07/466,008, Ser. No. 07/610,515, Ser. No. 07/919,297, Ser. No. 07/922,649, Ser. No. 08/031,801, Ser. No. 08/112,848, Ser. No. 08/234,145, Ser. No. 08/376,279, Ser. No. 08/430,938, Ser. No. 08/464,584, Ser. No. 08/464,582, Ser. No. 08/463,191, Ser. No. 08/462,837, Ser. No. 08/486,853, Ser. No. 08/486,857, Ser. No. 08/486,859, Ser. No. 08/462,513, Ser. No. 08/724,752, and Ser. No. 08/759,620; and U.S. Pat. Nos. 6,162,963; 6,150,584; 6,114,598; 6,075,181, and 5,939,598 and Japanese Patent Nos. 3 068 180 B2, 3 068 506 B2, and 3 068 507 B2. See also Mendez et al. Nature Genetics 15:146-156 (1997) and Green and Jakobovits J. Exp. Med. 188:483-495 (1998), EP 0 463 151 B1, WO 94/02602, WO 96/34096, WO 98/24893, WO 00/76310, and WO 03/47336.

[0228] In an alternative approach, others, including GenPharm International, Inc., have utilized a “minilocus” approach. In the minilocus approach, an exogenous Ig locus is mimicked through the inclusion of pieces (individual genes) from the Ig locus. Thus, one or more VH genes, one or more DH genes, one or more JH genes, a mu constant region, and a second constant region (preferably a gamma constant region) are formed into a construct for insertion into an animal. This approach is described in U.S. Pat. No. 5,545,807 to Surani et al. and U.S. Pat. Nos. 5,545,806; 5,625,825; 5,625,126; 5,633,425; 5,661,016; 5,770,429; 5,789,650; 5,814,318; 5,877,397; 5,874,299; and 6,255,458 each to Lonberg and Kay, U.S. Pat. Nos. 5,591,669 and 6,023.010 to Krimpenfort and Berns, U.S. Pat. Nos. 5,612,205; 5,721,367; and U.S. Pat. No. 5,789,215 to Berns et al., and U.S. Pat. No. 5,643,763 to Choi and Dunn, and GenPharm International U.S. patent application Ser. No. 07/574,748, Ser. No. 07/575,962, Ser. No. 07/810,279, Ser. No. 07/853,408, Ser. No. 07/904,068, Ser. No. 07/990,860, Ser. No. 08/053,131, Ser. No. 08/096,762, Ser. No. 08/155,301, Ser. No. 08/161,739, Ser. No. 08/165,699, Ser. No. 08/209,741. See also EP 0 546 073 B1, WO 92/03918, WO 92/22645, WO 92/22647, WO 92/22670, WO 93/12227, WO 94/00569, WO 94/25585, WO 96/14436, WO 97/13852, and WO 98/24884 and U.S. Pat. No. 5,981,175. See further Taylor et al. (1992), Chen et al. (1993), Tuaillon et al. (1993), Choi et al. (1993), Lonberg et al. (1994), Taylor et al. (1994), and Tuaillon et al. (1995), Fishwild et al. (1996).

[0229] Kirin has also demonstrated the generation of human antibodies from mice in which, through microcell fusion, large pieces of chromosomes, or entire chromosomes, have been introduced. See European Patent Application Nos. 773 288 and 843 961. Xenerex Biosciences is developing a technology for the potential generation of human antibodies. In this technology, SCID mice are reconstituted with human lymphatic cells, e.g., B and/or T cells. Mice are then immunized with an antigen and can generate an immune response against the antigen. See U.S. Pat. Nos. 5,476,996; 5,698,767; and 5,958,765.

[0230] Human anti-mouse antibody (HAMA) responses have led the industry to prepare chimeric or otherwise humanized antibodies. It is however expected that certain human anti-chimeric antibody (HACA) responses will be observed, particularly in chronic or multi-dose utilizations of the antibody. Thus, it would be desirable to provide antigen-binding molecules comprising a human binding domain against CS1, BCMA, CD20, CD22, FLT3, CD123, CLL1, CDH3, MSLN, or EpCAM and a human binding domain against CD3c in order to vitiate concerns and/or effects of HAMA or HACA response.

[0231] The terms “(specifically) binds to”, (specifically) recognizes”, “is (specifically) directed to”, and “(specifically) reacts with” mean in accordance with this invention that a binding domain interacts or specifically interacts with a given epitope or a given target side on the target molecules (antigens), here: CS1, BCMA, CD20, CD22, FLT3, CD123, CLL1, CDH3, MSLN, or EpCAM, and CD3C as effector, respectively.

[0232] The term “epitope” refers to a side on an antigen to which a binding domain, such as an antibody or immunoglobulin, or a derivative, fragment or variant of an antibody or an immunoglobulin, specifically binds. An “epitope” is antigenic and thus the term epitope is sometimes also referred to herein as “antigenic structure” or “antigenic determinant”. Thus, the binding domain is an “antigen interaction side”. Said binding/interaction is also understood to define a “specific recognition”.

[0233] “Epitopes” can be formed both by contiguous amino acids or non-contiguous amino acids juxtaposed by tertiary folding of a protein. A “linear epitope” is an epitope where an amino acid primary sequence comprises the recognized epitope. A linear epitope typically includes at least 3 or at least 4, and more usually, at least 5 or at least 6 or at least 7, for example, about 8 to about 10 amino acids in a unique sequence.

[0234] A “conformational epitope”, in contrast to a linear epitope, is an epitope wherein the primary sequence of the amino acids comprising the epitope is not the sole defining component of the epitope recognized (e.g., an epitope wherein the primary sequence of amino acids is not necessarily recognized by the binding domain). Typically, a conformational epitope comprises an increased number of amino acids relative to a linear epitope. With regard to recognition of conformational epitopes, the binding domain recognizes a three-dimensional structure of the antigen, preferably a peptide or protein or fragment thereof (in the context of the present invention, the antigenic structure for one of the binding domains is comprised within the target cell surface antigen protein). For example, when a protein molecule folds to form a three-dimensional structure, certain amino acids and/or the polypeptide backbone forming the conformational epitope become juxtaposed enabling the antibody to recognize the epitope. Methods of determining the conformation of epitopes include, but are not limited to, x-ray crystallography, two-dimensional nuclear magnetic resonance (2D-NMR) spectroscopy and site-directed spin labelling and electron paramagnetic resonance (EPR) spectroscopy.

[0235] A method for epitope mapping is described in the following: When a region (a contiguous amino acid stretch) in the human CS1, BCMA, CD20, CD22, FLT3, CD123, CLL1, CDH3, MSLN, or EpCAM protein is exchanged or replaced with its corresponding region of a non-human and non-primate CS1, BCMA, CD20, CD22, FLT3, CD123, CLL1, CDH3, MSLN, or EpCAM (e.g., mouse CS1, BCMA, CD20, CD22, FLT3, CD123, CLL1, CDH3, MSLN, or EpCAM, but others like chicken, rat, hamster, rabbit etc. may also be conceivable), a decrease in the binding of the binding domain is expected to occur, unless the binding domain is cross-reactive for the non-human, non-primate CS1, BCMA, CD20, CD22, FLT3, CD123, CLL1, CDH3, MSLN, or EpCAM used. Said decrease is preferably atleast 10%, 20%, 30%,40%, or 50%; more preferably at least 60%, 70%, or 80%, and most preferably 90%, 95% or even 100% in comparison to the binding to the respective region in the human CS1, BCMA, CD20, CD22, FLT3, CD123, CLL1, CDH3, MSLN, or EpCAM protein, whereby binding to the respective region in the human CS1, BCMA, CD20, CD22, FLT3, CD123, CLL1, CDH3, MSLN, or EpCAM protein is set to be 100%. It is envisaged that the aforementioned human CS1, BCMA, CD20, CD22, FLT3, CD123, CLL1, CDH3, MSLN, or EpCAM/non-human CS1, BCMA, CD20, CD22, FLT3, CD123, CLL1, CDH3, MSLN, or EpCAM chimeras are expressed in CHO cells. It is also envisaged that the human CS1, BCMA, CD20, CD22, FLT3, CD123, CLL1, CDH3, MSLN, or EpCAM/non-human CS1, BCMA, CD20, CD22, FLT3, CD123, CLL1, CDH3, MSLN, or EpCAM chimeras are fused with a transmembrane domain and/or cytoplasmic domain of a different membrane-bound protein such as EpCAM.

[0236] In an alternative or additional method for epitope mapping, several truncated versions of the human CS1, BCMA, CD20, CD22, FLT3, CD123, CLL1, CDH3, MSLN, or EpCAM extracellular domain can be generated in order to determine a specific region that is recognized by a binding domain. In these truncated versions, the different extracellular CS1, BCMA, CD20, CD22, FLT3, CD123, CLL1, CDH3, MSLN, or EpCAM domains/sub-domains or regions are stepwise deleted, starting from the N-terminus. It is envisaged that the truncated CS1, BCMA, CD20, CD22, FLT3, CD123, CLL1, CDH3, MSLN, or EpCAM versions may be expressed in CHO cells. It is also envisaged that the truncated CS1, BCMA, CD20, CD22, FLT3, CD123, CLL1, CDH3, MSLN, or EpCAM versions may be fused with a transmembrane domain and/or cytoplasmic domain of a different membrane-bound protein such as EpCAM. It is also envisaged that the truncated CS1, BCMA, CD20, CD22, FLT3, CD123, CLL1, CDH3, MSLN, or EpCAM versions may encompass a signal peptide domain at their N-terminus, for example a signal peptide derived from mouse IgG heavy chain signal peptide. It is furthermore envisaged that the truncated CS1, BCMA, CD20, CD22, FLT3, CD123, CLL1, CDH3, MSLN, or EpCAM versions may encompass a v5 domain at their N-terminus (following the signal peptide) which allows verifying their correct expression on the cell surface. A decrease or a loss of binding is expected to occur with those truncated CS1, BCMA, CD20, CD22, FLT3, CD123, CLL1, CDH3, MSLN, or EpCAM versions which do not encompass any more the CS1, BCMA, CD20, CD22, FLT3, CD123, CLL1, CDH3, MSLN, or EpCAM region that is recognized by the binding domain. The decrease of binding is preferably at least 10%, 20%, 30%, 40%, 50%; more preferably at least 60%, 70%, 80%, and most preferably 90%, 95% or even 100%, whereby binding to the entire human CS1, BCMA, CD20, CD22, FLT3, CD123, CLL1, CDH3, MSLN, or EpCAM protein (or its extracellular region or domain) is set to be 100.

[0237] A further method to determine the contribution of a specific residue of CS1, BCMA, CD20, CD22, FLT3, CD123, CLL1, CDH3, MSLN, or EpCAM to the recognition by an antigen-binding molecule or binding domain is alanine scanning (see e.g. Morrison K L & Weiss G A. Cur Opin Chem Biol. 2001 June;5(3):302-7), where each residue to be analyzed is replaced by alanine, e.g. via site-directed mutagenesis. Alanine is used because of its non-bulky, chemically inert, methyl functional group that nevertheless mimics the secondary structure references that many of the other amino acids possess. Sometimes bulky amino acids such as valine or leucine can be used in cases where conservation of the size of mutated residues is desired. Alanine scanning is a mature technology which has been used for a long period of time.

[0238] The interaction between the binding domain and the epitope or the region comprising the epitope implies that a binding domain exhibits appreciable affinity for the epitope/the region comprising the epitope on a particular protein or antigen (here:, CD20, CD22, FLT3, CD123, CLL1, CDH3, MSLN, or EpCAM and CD3, respectively) and, generally, does not exhibit significant reactivity with proteins or antigens other than the CS1, BCMA, CD20, CD22, FLT3, CD123, CLL1, CDH3, MSLN, or EpCAM or CD3. “Appreciable affinity” includes binding with an affinity of about 10⁻⁶ M (KD) or stronger. Preferably, binding is considered specific when the binding affinity is about 10⁻¹¹ to 10⁻⁸ M, 10⁻¹² to 10⁻⁹ M, 10⁻¹² to 10¹⁰ M, 10⁻¹¹ to 10⁻⁸ M, preferably of about 10⁻¹¹ to 10⁻⁹ M. Whether a binding domain specifically reacts with or binds to a target can be tested readily by, inter alia, comparing the reaction of said binding domain with a target protein or antigen with the reaction of said binding domain with proteins or antigens other than the CS1, BCMA, CD20, CD22, FLT3, CD123, CLL1, CDH3, MSLN, or EpCAM or CD3. Preferably, a binding domain of the invention does not essentially or substantially bind to proteins or antigens other than CST, BCMA, CD20, CD22, FLT3, CD123, CLL1, CDH3, MSLN, or EpCAM or CD3 (i.e., the first binding domain is not capable of binding to proteins other than CST, BCMA, CD20, CD22, FLT3, CD123, CLL1, CDH3, MSLN, or EpCAM and the second binding domain is not capable of binding to proteins other than CD3). It is an envisaged characteristic of the antigen-binding molecules according to the present invention to have superior affinity characteristics in comparison to other HLE formats. Such a superior affinity, in consequence, suggests a prolonged half-life in vivo. The longer half-life of the antigen-binding molecules according to the present invention may reduce the duration and frequency of administration which typically contributes to improved patient compliance. This is of particular importance as the antigen-binding molecules of the present invention are particularly beneficial for highly weakened or even multimorbid cancer patients.

[0239] The term “does not essentially/substantially bind” or “is not capable of binding” means that a binding domain of the present invention does not bind a protein or antigen other than the CST, BCMA, CD20, CD22, FLT3, CD123, CLL1, CDH3, MSLN, or EpCAM or CD3 as effector, i.e., does not show reactivity of more than 30%, preferably not more than 20%, more preferably not more than 10%, particularly preferably not more than 9%, 8%, 7%, 6% or 5% with proteins or antigens other than CST, BCMA, CD20, CD22, FLT3, CD123, CLL1, CDH3, MSLN, or EpCAM or CD3 as effector, whereby binding to the CST, BCMA, CD20, CD22, FLT3, CD123, CLL1, CDH3, MSLN, or EpCAM or CD3 as effector, respectively, is set to be 100%.

[0240] Specific binding is believed to be effected by specific motifs in the amino acid sequence of the binding domain and the antigen. Thus, binding is achieved as a result of their primary, secondary and/or tertiary structure as well as the result of secondary modifications of said structures. The specific interaction of the antigen-interaction-side with its specific antigen may result in a simple binding of said side to the antigen. Moreover, the specific interaction of the antigen-interaction-side with its specific antigen may alternatively or additionally result in the initiation of a signal, e.g. due to the induction of a change of the conformation of the antigen, an oligomerization of the antigen, etc.

[0241] The term “variable” refers to the portions of the antibody or immunoglobulin domains that exhibit variability in their sequence and that are involved in determining the specificity and binding affinity of a particular antibody (i.e., the “variable domain(s)”). The pairing of a variable heavy chain (VH) and a variable light chain (VL) together forms a single antigen-binding site.

[0242] Variability is not evenly distributed throughout the variable domains of antibodies; it is concentrated in sub-domains of each of the heavy and light chain variable regions. These sub-domains are called “hypervariable regions” or “complementarity determining regions” (CDRs). The more conserved (i.e., non-hypervariable) portions of the variable domains are called the “framework” regions (FRM or FR) and provide a scaffold for the six CDRs in three dimensional space to form an antigen-binding surface. The variable domains of naturally occurring heavy and light chains each comprise four FRM regions (FR1, FR2, FR3, and FR4), largely adopting a 3-sheet configuration, connected by three hypervariable regions, which form loops connecting, and in some cases forming part of, the β-sheet structure. The hypervariable regions in each chain are held together in close proximity by the FRM and, with the hypervariable regions from the other chain, contribute to the formation of the antigen-binding side (see Kabat et al., loc. cit.).

[0243] The terms “CDR”, and its plural “CDRs”, refer to the complementarity determining region of which three make up the binding character of a light chain variable region (CDR-L1, CDR-L2 and CDR-L3) and three make up the binding character of a heavy chain variable region (CDR-H1, CDR-H2 and CDR-H3). CDRs contain most of the residues responsible for specific interactions of the antibody with the antigen and hence contribute to the functional activity of an antibody molecule: they are the main determinants of antigen specificity.

[0244] The exact definitional CDR boundaries and lengths are subject to different classification and numbering systems. CDRs may therefore be referred to by Kabat, Chothia, contact or any other boundary definitions, including the numbering system described herein. Despite differing boundaries, each of these systems has some degree of overlap in what constitutes the so called “hypervariable regions” within the variable sequences. CDR definitions according to these systems may therefore differ in length and boundary areas with respect to the adjacent framework region. See for example Kabat (an approach based on cross-species sequence variability), Chothia (an approach based on crystallographic studies of antigen-antibody complexes), and/or MacCallum (Kabat et al., loc. cit.; Chothia et al., J. MoI. Biol, 1987, 196:901-917; and MacCallum et al., J. MoI. Biol, 1996, 262:732). Still another standard for characterizing the antigen binding side is the AbM definition used by Oxford Molecular's AbM antibody modeling software. See, e.g., Protein Sequence and Structure Analysis of Antibody Variable Domains. In: Antibody Engineering Lab Manual (Ed.: Duebel, S. and Kontermann, R., Springer-Verlag, Heidelberg). To the extent that two residue identification techniques define regions of overlapping, but not identical regions, they can be combined to define a hybrid CDR. However, the numbering in accordance with the so-called Kabat system is preferred.

[0245] Typically, CDRs form a loop structure that can be classified as a canonical structure. The term “canonical structure” refers to the main chain conformation that is adopted by the antigen binding (CDR) loops. From comparative structural studies, it has been found that five of the six antigen binding loops have only a limited repertoire of available conformations. Each canonical structure can be characterized by the torsion angles of the polypeptide backbone. Correspondent loops between antibodies may, therefore, have very similar three dimensional structures, despite high amino acid sequence variability in most parts of the loops (Chothia and Lesk, J. MoI. Biol., 1987, 196:901; Chothia et al., Nature, 1989, 342:877; Martin and Thornton, J. MoI. Biol, 1996, 263:800). Furthermore, there is a relationship between the adopted loop structure and the amino acid sequences surrounding it. The conformation of a particular canonical class is determined by the length of the loop and the amino acid residues residing at key positions within the loop, as well as within the conserved framework (i.e., outside of the loop). Assignment to a particular canonical class can therefore be made based on the presence of these key amino acid residues.

[0246] The term “canonical structure” may also include considerations as to the linear sequence of the antibody, for example, as catalogued by Kabat (Kabat et al., loc. cit.). The Kabat numbering scheme (system) is a widely adopted standard for numbering the amino acid residues of an antibody variable domain in a consistent manner and is the preferred scheme applied in the present invention as also mentioned elsewhere herein. Additional structural considerations can also be used to determine the canonical structure of an antibody. For example, those differences not fully reflected by Kabat numbering can be described by the numbering system of Chothia et al. and/or revealed by other techniques, for example, crystallography and two- or three-dimensional computational modeling. Accordingly, a given antibody sequence may be placed into a canonical class which allows for, among other things, identifying appropriate chassis sequences (e.g., based on a desire to include a variety of canonical structures in a library). Kabat numbering of antibody amino acid sequences and structural considerations as described by Chothia et al., loc. cit. and their implications for construing canonical aspects of antibody structure, are described in the literature. The subunit structures and three-dimensional configurations of different classes of immunoglobulins are well known in the art. For a review of the antibody structure, see Antibodies: A Laboratory Manual, Cold Spring Harbor Laboratory, eds. Harlow et al., 1988.

[0247] The CDR3 of the light chain and, particularly, the CDR3 of the heavy chain may constitute the most important determinants in antigen binding within the light and heavy chain variable regions. In some antigen-binding molecules, the heavy chain CDR3 appears to constitute the major area of contact between the antigen and the antibody. In vitro selection schemes in which CDR3 alone is varied can be used to vary the binding properties of an antibody or determine which residues contribute to the binding of an antigen. Hence, CDR3 is typically the greatest source of molecular diversity within the antibody-binding side. H3, for example, can be as short as two amino acid residues or greater than 26 amino acids.

[0248] In a classical full-length antibody or immunoglobulin, each light (L) chain is linked to a heavy (H) chain by one covalent disulfide bond, while the two H chains are linked to each other by one or more disulfide bonds depending on the H chain isotype. The CH domain most proximal to VH is usually designated as CH1. The constant (“C”) domains are not directly involved in antigen binding, but exhibit various effector functions, such as antibody-dependent, cell-mediated cytotoxicity and complement activation. The Fc region of an antibody is comprised within the heavy chain constant domains and is for example able to interact with cell surface located Fc receptors.

[0249] The sequence of antibody genes after assembly and somatic mutation is highly varied, and these varied genes are estimated to encode 10¹⁰ different antibody molecules (Immunoglobulin Genes, 2^{nd} ed., eds. Jonio et al., Academic Press, San Diego, CA, 1995). Accordingly, the immune system provides a repertoire of immunoglobulins. The term “repertoire” refers to at least one nucleotide sequence derived wholly or partially from at least one sequence encoding at least one immunoglobulin. The sequence(s) may be generated by rearrangement in vivo of the V, D, and J segments of heavy chains, and the V and J segments of light chains. Alternatively, the sequence(s) can be generated from a cell in response to which rearrangement occurs, e.g., in vitro stimulation. Alternatively, part or all of the sequence(s) may be obtained by DNA splicing, nucleotide synthesis, mutagenesis, and other methods, see, e.g., U.S. Pat. No. 5,565,332. A repertoire may include only one sequence or may include a plurality of sequences, including ones in a genetically diverse collection.

[0250] The term “Fc portion” or “Fc monomer” means in connection with this invention a polypeptide comprising at least one domain having the function of a CH2 domain and at least one domain having the function of a CH3 domain of an immunoglobulin molecule. As apparent from the term “Fc monomer”, the polypeptide comprising those CH domains is a “polypeptide monomer”. An Fc monomer can be a polypeptide comprising at least a fragment of the constant region of an immunoglobulin excluding the first constant region immunoglobulin domain of the heavy chain (CH1), but maintaining at least a functional part of one CH2 domain and a functional part of one CH3 domain, wherein the CH2 domain is amino terminal to the CH3 domain. In a preferred aspect of this definition, an Fc monomer can be a polypeptide constant region comprising a portion of the Ig-Fc hinge region, a CH2 region and a CH3 region, wherein the hinge region is amino terminal to the CH2 domain. It is envisaged that the hinge region of the present invention promotes dimerization. Such Fc polypeptide molecules can be obtained by papain digestion of an immunoglobulin region (of course resulting in a dimer of two Fc polypeptide), for example and not limitation. In another aspect of this definition, an Fc monomer can be a polypeptide region comprising a portion of a CH2 region and a CH3 region. Such Fc polypeptide molecules can be obtained by pepsin digestion of an immunoglobulin molecule, for example and not limitation. In one embodiment, the polypeptide sequence of an Fe monomer is substantially similar to an Fe polypeptide sequence of: an IgG₁ Fe region, an IgG₂ Fe region, an IgG₃ Fe region, an IgG₄ Fe region, an IgM Fe region, an IgA Fe region, an IgD Fe region and an IgE Fe region. (See, e.g., Padlan, Molecular Immunology, 31(3), 169-217 (1993)). Because there is some variation between immunoglobulins, and solely for clarity, Fe monomer refers to the last two heavy chain constant region immunoglobulin domains of IgA, IgD, and IgG, and the last three heavy chain constant region immunoglobulin domains of IgE and IgM. As mentioned, the Fe monomer can also include the flexible hinge N-terminal to these domains. For IgA and IgM, the Fe monomer may include the J chain. For IgG, the Fe portion comprises immunoglobulin domains CH2 and CH3 and the hinge between the first two domains and CH2. Although the boundaries of the Fe portion may vary an example for a human IgG heavy chain Fe portion comprising a functional hinge, CH2 and CH3 domain can be defined e.g. to comprise residues D231 (of the hinge domain—corresponding to D234 in Table 1 below) to P476, respectively L476 (for IgG₄) of the carboxyl-terminus of the CH3 domain, wherein the numbering is according to Kabat. The two Fe portion or Fe monomer, which are fused to each other via a peptide linker are a preferred example of the spacer between the two bispecific entities of the antigen-binding molecule of the invention, which may also be defined as scFe domain.

[0251] In one embodiment of the invention it is envisaged that a scFe domain as disclosed herein, respectively the Fe monomers fused to each other are comprised only in the spacer of the antigen-binding molecule.

[0252] In line with the present invention an IgG hinge region can be identified by analogy using the Kabat numbering as set forth in Table 1. In line with the above, it is envisaged that for a hinge domain/region of the present invention the minimal requirement comprises the amino acid residues corresponding to the IgG1 sequence stretch of D231 D234 to P243 according to the Kabat numbering. It is likewise envisaged that a hinge domain/region of the present invention comprises or consists of the IgG1 hinge sequence DKTHTCPPCP (SEQ ID NO: 330) (corresponding to the stretch D234 to P243 as shown in Table 1 below—variations of said sequence are also envisaged provided that the hinge region still promotes dimerization). In a preferred embodiment of the invention the glycosylation site at Kabat position 314 of the CH2 domains in the spacer of the antigen-binding molecule is removed by a N314X substitution, wherein X is any amino acid excluding Q. Said substitution is preferably a N314G substitution. In a more preferred embodiment, said CH2 domain additionally comprises the following substitutions (position according to Kabat) V321C and R309C (these substitutions introduce the intra domain cysteine disulfide bridge at Kabat positions 309 and 321).

[0253] It is also envisaged that the spacer of the antigen-binding molecule of the invention is a scFe domain which may comprise or consist of an amino to carboxyl order: DKTHTCPPCP (SEQ ID NO: 330) (i.e. hinge)—CH2-CH3-linker-DKTHTCPPCP (SEQ ID NO: 330) (i.e. hinge)—CH2-CH3. The peptide linker of the aforementioned antigen-binding molecule is in a preferred embodiment characterized by the amino acid sequence Gly-Gly-Gly-Gly-Ser, i.e. Gly4Ser (SEQ ID NO: 7), or polymers thereof, i.e. (Gly4Ser)x, where x is an integer of 5 or greater (e.g. 5, 6, 7, 8 etc. or greater), 6 being preferred ((Gly4Ser)6). According to the present invention, the Ser may advantageously be replaced by Gln as disclosed herein. Said construct may further comprise the aforementioned substitutions: N314X, preferably N314G, and/or the further substitutions V321C and R309C. In a preferred embodiment of the antigen-binding molecules of the invention as defined herein before, it is envisaged that the second domain binds to an extracellular epitope of the human and/or the Macaca CD3ε chain.

TABLE 1
Kabat numbering of the amino acid residues
of the hinge region

| IMGT | | |
|---|---|---|
| numbering for | IgG₁ amino acid | Kabat |
| the hinge | translation | numbering |
| 1 | (E) | 226 |
| 2 | P | 227 |
| 3 | K | 228 |
| 4 | S | 232 |
| 5 | C | 233 |
| 6 | D | 234 |
| 7 | K | 235 |
| 8 | T | 236 |
| 9 | H | 237 |
| 10 | T | 238 |
| 11 | C | 239 |
| 12 | P | 240 |
| 13 | P | 241 |
| 14 | C | 242 |
| 15 | P | 243 |

[0254] In further embodiments of the present invention, the hinge domain/region comprises or consists of the IgG2 subtype hinge sequence ERKCCVECPPCP (SEQ ID NO: 331), the IgG3 subtype hinge sequence ELKTPLDTTHTCPRCP (SEQ ID NO: 332) or ELKTPLGDTTHTCPRCP (SEQ ID NO:333), and/or the IgG4 subtype hinge sequence ESKYGPPCPSCP (SEQ ID NO: 444). The IgG1 subtype hinge sequence may be the following one EPKSCDKTHTCPPCP (as shown in Table 1 and SEQ ID NO: 445). These core hinge regions are thus also envisaged in the context of the present invention.

[0255] The location and sequence of the IgG CH2 and IgG CD3 domain can be identified by analogy using the Kabat numbering as set forth in Table 2:

TABLE 2
Kabat numbering of the amino acid residues of the IgG CH2 and CH3 region

| IgG | CH2 aa | CH2 Kabat | CH3 aa | CH3 Kabat |
|---|---|---|---|---|
| subtype | translation | numbering | translation | numbering |
| IgG₁ | APE . . . KAK | 244 . . . 360 | GQP . . . PGK | 361 . . . 478 |
| IgG₂ | APP . . . KTK | 244 . . . 360 | GQP . . . PGK | 361 . . . 478 |
| IgG₃ | APE . . . KTK | 244 . . . 360 | GQP . . . PGK | 361 . . . 478 |
| IgG₄ | APE . . . KAK | 244 . . . 360 | GQP . . . LGK | 361 . . . 478 |

[0256] In one embodiment of the invention the emphasized bold amino acid residues in the CH3 domain of the first or both Fc monomers are deleted.

[0257] The peptide linker, by whom the polypeptide monomers (“Fc portion” or “Fc monomer”) of the spacer are fused to each other, preferably comprises at least 25 amino acid residues (25, 26, 27, 28, 29, 30 etc.). More preferably, this peptide linker comprises at least 30 amino acid residues (30, 31, 32, 33, 34, 35 etc.). It is also preferred that the linker comprises up to 40 amino acid residues, more preferably up to 35 amino acid residues, most preferably exactly 30 amino acid residues. A preferred embodiment of such peptide linker is characterized by the amino acid sequence Gly-Gly-Gly-Gly-Ser, i.e. Gly₄Ser (SEQ ID NO: 7), or polymers thereof, i.e. (Gly₄Ser)x, where x is an integer of 5 or greater (e.g. 6, 7 or 8). Preferably the integer is 6 or 7, more preferably the integer is 6.

[0258] In the event that a linker is used to fuse the first domain to the second domain, and/or he third to the fourth domain, and/or the second and the third domain to the spacer, this linker is preferably of a length and sequence sufficient to ensure that each of the first and second domains can, independently from one another, retain their differential binding specificities. For peptide linkers which connect the at least two binding domains (or two variable domains) in the antigen-binding molecule of the invention, those peptide linkers are preferred which comprise only a few number of amino acid residues, e.g. 12 amino acid residues or less. Thus, peptide linkers of 12, 11, 10, 9, 8, 7, 6 or 5 amino acid residues are preferred. An envisaged peptide linker with less than 5 amino acids comprises 4, 3, 2 or one amino acid(s), wherein Gly-rich linkers are preferred. A preferred embodiment of the peptide linker for a fusion the first and the second domain is depicted in SEQ ID NO:1. A preferred linker embodiment of the peptide linker for fusing the second and the third domain to the spacer is a (Gly)₄-linker, also called G₄-linker.

[0259] A particularly preferred “single” amino acid in the context of one of the above described “peptide linker” is Gly. Accordingly, said peptide linker may consist of the single amino acid Gly. In a preferred embodiment of the invention a peptide linker is characterized by the amino acid sequence Gly-Gly-Gly-Gly-Ser, i.e. Gly₄Ser (SEQ ID NO: 1), or polymers thereof, i.e. (Gly₄Ser)x, where x is an integer of 1 or greater (e.g. 2 or 3). Preferred linkers are depicted in SEQ ID NOs: 1 to 12. The characteristics of said peptide linker, which comprise the absence of the promotion of secondary structures, are known in the art and are described e.g. in Dall'Acqua et al. (Biochem. (1998) 37, 9266-9273), Cheadle et al. (Mol Immunol (1992) 29, 21-30) and Raag and Whitlow (FASEB (1995) 9(1), 73-80). Peptide linkers which furthermore do not promote any secondary structures are preferred. The linkage of said domains to each other can be provided, e.g., by genetic engineering, as described in the examples. Methods for preparing fused and operatively linked bispecific single chain constructs and expressing them in mammalian cells or bacteria are well-known in the art (e.g. WO 99/54440 or Sambrook et al., Molecular Cloning: A Laboratory Manual, Cold Spring Harbor Laboratory Press, Cold Spring Harbor, New York, 2001).

[0260] In a preferred embodiment of the antigen-binding molecule or the present invention the first and second domain form an antigen-binding molecule in a format selected from the group consisting of (scFv)₂, scFv-single domain mAb, diabody and oligomers of any of these formats.

[0261] According to a particularly preferred embodiment, and as documented in the appended examples, the first and the second domain of the antigen-binding molecule of the invention is a “bispecific single chain antigen-binding molecule”, more preferably a bispecific “single chain Fv” (scFv). Although the two domains of the Fv fragment, VL and VH, are coded for by separate genes, they can be joined, using recombinant methods, by a synthetic linker—as described hereinbefore—that enables them to be made as a single protein chain in which the VL and VH regions pair to form a monovalent molecule; see e.g., Huston et al. (1988) Proc. Natl. Acad. Sci USA 85:5879-5883). These antibody fragments are obtained using conventional techniques known to those with skill in the art, and the fragments are evaluated for function in the same manner as are whole or full-length antibodies. A single-chain variable fragment (scFv) is hence a fusion protein of the variable region of the heavy chain (VH) and of the light chain (VL) of immunoglobulins, usually connected with a short linker peptide of about ten to about 25 amino acids, preferably about 15 to 20 amino acids. The linker is usually rich in glycine for flexibility, as well as serine or threonine for solubility, and can either connect the N-terminus of the VH with the C-terminus of the VL, or vice versa. This protein retains the specificity of the original immunoglobulin, despite removal of the constant regions and introduction of the linker.

[0262] Bispecific single chain antigen-binding molecules are known in the art and are described in WO 99/54440, Mack, J. Immunol. (1997), 158, 3965-3970, Mack, PNAS, (1995), 92, 7021-7025, Kufer, Cancer Immunol. Immunother., (1997), 45, 193-197, Löffler, Blood, (2000), 95, 6, 2098-2103, Brühl, Immunol., (2001), 166, 2420-2426, Kipriyanov, J. Mol. Biol., (1999), 293, 41-56. Techniques described for the production of single chain antibodies (see, inter alia, U.S. Pat. No. 4,946,778, Kontermann and Dubel (2010), loc. cit. and Little (2009), loc. cit.) can be adapted to produce single chain antigen-binding molecules specifically recognizing (an) elected target(s).

[0263] Bivalent (also called divalent) or bispecific single-chain variable fragments (bi-scFvs or di-scFvs having the format (scFv)₂ can be engineered by linking two scFv molecules (e.g. with linkers as described hereinbefore). If these two scFv molecules have the same binding specificity, the resulting (scFv)₂ molecule will preferably be called bivalent (i.e. it has two valences for the same target epitope). If the two scFv molecules have different binding specificities, the resulting (scFv)₂ molecule will preferably be called bispecific. The linking can be done by producing a single peptide chain with two VH regions and two VL regions, yielding tandem scFvs (see e.g. Kufer P. et al., (2004) Trends in Biotechnology 22(5):238-244). Another possibility is the creation of scFv molecules with linker peptides that are too short for the two variable regions to fold together (e.g. about five amino acids), forcing the scFvs to dimerize. This type is known as diabodies (see e.g. Hollinger, Philipp et al., (July 1993) Proceedings of the National Academy of Sciences of the United States of America 90 (14): 6444-8).

[0264] In line with this invention either the first, the second, the third and/or the fourth may comprise a single domain antibody, respectively the variable domain or at least the CDRs of a single domain antibody. Single domain antibodies comprise merely one (monomeric) antibody variable domain which is able to bind selectively to a specific antigen, independently of other V regions or domains. The first single domain antibodies were engineered from heavy chain antibodies found in camelids, and these are called V_{H}H fragments. Cartilaginous fishes also have heavy chain antibodies (IgNAR) from which single domain antibodies called V_{NAR} fragments can be obtained. An alternative approach is to split the dimeric variable domains from common immunoglobulins e.g. from humans or rodents into monomers, hence obtaining VH or VL as a single domain Ab. Although most research into single domain antibodies is currently based on heavy chain variable domains, nanobodies derived from light chains have also been shown to bind specifically to target epitopes. Examples of single domain antibodies are called sdAb, nanobodies or single variable domain antibodies.

[0265] A (single domain mAb)₂ is hence a monoclonal antigen-binding molecule composed of (at least) two single domain monoclonal antibodies, which are individually selected from the group comprising V_{H}, V_{L}, V_{H}H and V_{NAR}. The linker is preferably in the form of a peptide linker. Similarly, an “scFv-single domain mAb” is a monoclonal antigen-binding molecule composed of at least one single domain antibody as described above and one scFv molecule as described above. Again, the linker is preferably in the form of a peptide linker.

[0266] Whether or not an antigen-binding molecule competes for binding with another given antigen-binding molecule can be measured in a competition assay such as a competitive ELISA or a cell-based competition assay. Avidin-coupled microparticles (beads) can also be used. Similar to an avidin-coated ELISA plate, when reacted with a biotinylated protein, each of these beads can be used as a substrate on which an assay can be performed. Antigen is coated onto a bead and then precoated with the first antibody. The second antibody is added and any additional binding is determined. Possible means for the read-out includes flow cytometry.

[0267] T cells or T lymphocytes are a type of lymphocyte (itself a type of white blood cell) that play a central role in cell-mediated immunity. There are several subsets of T cells, each with a distinct function. T cells can be distinguished from other lymphocytes, such as B cells and NK cells, by the presence of a T cell receptor (TCR) on the cell surface. The TCR is responsible for recognizing antigens bound to major histocompatibility complex (MHC) molecules and is composed of two different protein chains. In 95% of the T cells, the TCR consists of an alpha (α) and beta (β) chain. When the TCR engages with antigenic peptide and MHC (peptide/MHC complex), the T lymphocyte is activated through a series of biochemical events mediated by associated enzymes, co-receptors, specialized adaptor molecules, and activated or released transcription factors.

[0268] The CD3 receptor complex is a protein complex and is composed of four chains. In mammals, the complex contains a CD3γ (gamma) chain, a CD36 (delta) chain, and two CD3ε (epsilon) chains. These chains associate with the T cell receptor (TCR) and the so-called ζ (zeta) chain to form the T cell receptor CD3 complex and to generate an activation signal in T lymphocytes. The CD3γ (gamma), CD3δ (delta), and CD3ε (epsilon) chains are highly related cell-surface proteins of the immunoglobulin superfamily containing a single extracellular immunoglobulin domain. The intracellular tails of the CD3 molecules contain a single conserved motif known as an immunoreceptor tyrosine-based activation motif or ITAM for short, which is essential for the signaling capacity of the TCR. The CD3 epsilon molecule is a polypeptide which in humans is encoded by the CD3E gene which resides on chromosome 11. The most preferred epitope of CD3 epsilon is comprised within amino acid residues 1-27 of the human CD3 epsilon extracellular domain. It is envisaged that antigen-binding molecules according to the present invention typically and advantageously show less unspecific T cell activation, which is not desired in specific immunotherapy. This translates to a reduced risk of side effects.

[0269] The redirected lysis of target cells via the recruitment of T cells by a multichain multitargeting least bispecific antigen-binding molecule involves cytolytic synapse formation and delivery of perforin and granzymes. The engaged T cells are capable of serial target cell lysis, and are not affected by immune escape mechanisms interfering with peptide antigen processing and presentation, or clonal T cell differentiation; see, for example, WO 2007/042261.

[0270] Cytotoxicity mediated by antigen-binding molecules of the invention can be measured in various ways. Effector cells can be e.g. stimulated enriched (human) CD8 positive T cells or unstimulated (human) peripheral blood mononuclear cells (PBMC). If the target cells are of macaque origin or express or are transfected with macaque CS1, BCMA, CD20, CD22, FLT3, CD123, CLL1, CHD3, MSLN, or EpCAM which is bound by the first domain, the effector cells should also be of macaque origin such as a macaque T cell line, e.g. 4119LnPx. The target cells should express (at least the extracellular domain of) CS1, BCMA, CD20, CD22, FLT3, CD123, CLL1, CHD3, MSLN, or EpCAM, e.g. human or macaque CS1, BCMA, CD20, CD22, FLT3, CD123, CLL1, CHD3, MSLN, or EpCAM. Target cells can be a cell line (such as CHO) which is stably or transiently transfected with CS1, BCMA, CD20, CD22, FLT3, CD123, CLL1, CHD3, MSLN, or EpCAM, e.g. human or macaque CS1, BCMA, CD20, CD22, FLT3, CD123, CLL1, CHD3, MSLN, or EpCAM. Usually EC₅₀ values are expected to be lower with target cell lines expressing higher levels of CS1, BCMA, CD20, CD22, FLT3, CD123, CLL1, CHD3, MSLN, or EpCAM on the cell surface. The effector to target cell (E:T) ratio is usually about 10:1, but can also vary. Cytotoxic activity of CS1, BCMA, CD20, CD22, FLT3, CD123, CLL1, CHD3, MSLN, or EpCAM bispecific antigen-binding molecules can be measured in a ⁵¹Cr-release assay (incubation time of about 18 hours) or in a in a FACS-based cytotoxicity assay (incubation time of about 48 hours). Modifications of the assay incubation time (cytotoxic reaction) are also possible. Other methods of measuring cytotoxicity are well-known to the skilled person and comprise MTT or MTS assays, ATP-based assays including bioluminescent assays, the sulforhodamine B (SRB) assay, WST assay, clonogenic assay and the ECIS technology.

[0271] The cytotoxic activity mediated by CS1, BCMA, CD20, CD22, FLT3, CD123, CLL1, CHD3, MSLN, or EpCAMxCD3 bispecific antigen-binding molecules of the present invention is preferably measured in a cell-based cytotoxicity assay. It may also be measured in a ⁵¹Cr-release assay. It is represented by the EC₅₀ value, which corresponds to the half maximal effective concentration (concentration of the antigen-binding molecule which induces a cytotoxic response halfway between the baseline and maximum). Preferably, the EC₅₀ value of the CS1, BCMA, CD20, CD22, FLT3, CD123, CLL1, CHD3, MSLN, or EpCAMxCD3 bispecific antigen-binding molecules is ≤5000 pM or ≤4000 pM, more preferably ≤3000 pM or ≤2000 pM, even more preferably ≤1000 pM or ≤500 pM, even more preferably ≤400 pM or ≤300 pM, even more preferably ≤200 pM, even more preferably ≤100 pM, even more preferably ≤50 pM, even more preferably ≤20 pM or ≤10 pM, and most preferably 5 pM.

[0272] The above given EC₅₀ values can be measured in different assays. The skilled person is aware that an EC₅₀ value can be expected to be lower when stimulated/enriched CD8⁺ T cells are used as effector cells, compared with unstimulated PBMC. It can furthermore be expected that the EC₅₀ values are lower when the target cells express a high number of CS1, BCMA, CD20, CD22, FLT3, CD123, CLL1, CHD3, MSLN, or EpCAM compared with a low target expression rat. For example, when stimulated/enriched human CD8⁺ T cells are used as effector cells (and either CS1, BCMA, CD20, CD22, FLT3, CD123, CLL1, CHD3, MSLN, or EpCAM transfected cells such as CHO cells or CS1, BCMA, CD20, CD22, FLT3, CD123, CLL1, CHD3, MSLN, or EpCAM positive human cell lines are used as target cells), the EC₅₀ value of the CS1, BCMA, CD20, CD22, FLT3, CD123, CLL1, CHD3, MSLN, or EpCAMxCD3 bispecific antigen-binding molecule is preferably ≤1000 pM, more preferably ≤500 pM, even more preferably ≤250 pM, even more preferably ≤100 pM, even more preferably ≤50 pM, even more preferably ≤10 pM, and most preferably ≤5 pM. When human PBMCs are used as effector cells, the EC₅₀ value of the CS1, BCMA, CD20, CD22, FLT3, CD123, CLL1, CHD3, MSLN, or EpCAMxCD3 bispecific antigen-binding molecule is preferably ≤5000 pM or ≤4000 pM (in particular when the target cells are CS1, BCMA, CD20, CD22, FLT3, CD123, CLL1, CHD3, MSLN, or EpCAM positive human cell lines), more preferably ≤2000 pM (in particular when the target cells are CS1, BCMA, CD20, CD22, FLT3, CD123, CLL1, CHD3, MSLN, or EpCAM transfected cells such as CHO cells), more preferably ≤1000 pM or ≤500 pM, even more preferably ≤200 pM, even more preferably ≤150 pM, even more preferably ≤100 pM, and most preferably ≤50 pM, or lower. When a macaque T cell line such as LnPx4119 is used as effector cells, and a macaque CS1, BCMA, CD20, CD22, FLT3, CD123, CLL1, CHD3, MSLN, or EpCAM transfected cell line such as CHO cells is used as target cell line, the EC₅₀ value of the CS1, BCMA, CD20, CD22, FLT3, CD123, CLL1, CHD3, MSLN, or EpCAMxCD3 bispecific antigen-binding molecule is preferably ≤2000 pM or ≤1500 pM, more preferably ≤1000 pM or ≤500 pM, even more preferably ≤300 pM or ≤250 pM, even more preferably ≤100 pM, and most preferably ≤50 pM.

[0273] Preferably, the CS1, BCMA, CD20, CD22, FLT3, CD123, CLL1, CHD3, MSLN, or EpCAMxCD3 bispecific antigen-binding molecules of the present invention do not induce/mediate lysis or do not essentially induce/mediate lysis of CS1, BCMA, CD20, CD22, FLT3, CD123, CLL1, CHD3, MSLN, or EpCAM negative cells such as CHO cells. The term “do not induce lysis”, “do not essentially induce lysis”, “do not mediate lysis” or “do not essentially mediate lysis” means that an antigen-binding molecule of the present invention does not induce or mediate lysis of more than 30%, preferably not more than 20%, more preferably not more than 10%, particularly preferably not more than 9%, 8%, 7%, 6% or 5% of CS1, BCMA, CD20, CD22, FLT3, CD123, CLL1, CHD3, MSLN, or EpCAM negative cells, whereby lysis of a CS1, BCMA, CD20, CD22, FLT3, CD123, CLL1, CHD3, MSLN, or EpCAM positive human cell line is set to be 100%. This usually applies for concentrations of the antigen-binding molecule of up to 500 nM. The skilled person knows how to measure cell lysis without further ado. Moreover, the present specification teaches specific instructions how to measure cell lysis.

[0274] The difference in cytotoxic activity between the monomeric and the dimeric isoform of individual CS1, BCMA, CD20, CD22, FLT3, CD123, CLL1, CHD3, MSLN, or EpCAMxCD3 bispecific antigen-binding molecules is referred to as “potency gap”. This potency gap can e.g. be calculated as ratio between EC₅₀ values of the molecule's monomeric and dimeric form. Potency gaps of the CS1, BCMA, CD20, CD22, FLT3, CD123, CLL1, CHD3, MSLN, or EpCAMxCD3 bispecific antigen-binding molecules of the present invention are preferably ≤5, more preferably ≤4, even more preferably ≤3, even more preferably ≤2 and most preferably ≤1.

[0275] The first, second, third and/or the fourth binding domain of the antigen-binding molecule of the invention is/are preferably cross-species specific for members of the mammalian order of primates. Cross-species specific CD3 binding domains are, for example, those described herein and in WO 2008/119567. According to one embodiment, the first and third binding domain, in addition to binding to human CS1, BCMA, CD20, CD22, FLT3, CD123, CLL1, CHD3, MSLN, or EpCAM and human CD3, respectively, will also bind to CS1, BCMA, CD20, CD22, FLT3, CD123, CLL1, CHD3, MSLN, or EpCAM/CD3 of primates including (but not limited to) new world primates (such as Callithrix jacchus, Saguinus Oedipus or Saimiri sciureus), old world primates (such baboons and macaques), gibbons, and non-human homininae.

[0276] In one embodiment of the antigen-binding molecule of the invention the first domain binds to human CS1, BCMA, CD20, CD22, FLT3, CD123, CLL1, CHD3, MSLN, or EpCAM and further binds to macaque CS1, BCMA, CD20, CD22, FLT3, CD123, CLL1, CHD3, MSLN, or EpCAM, such as CS1, BCMA, CD20, CD22, FLT3, CD123, CLL1, CHD3, MSLN, or EpCAM of Macaca fascicularis, and more preferably, to macaque CS1, BCMA, CD20, CD22, FLT3, CD123, CLL1, CHD3, MSLN, or EpCAM expressed on the surface of cells, e.g. such as CHO or 293 cells. The affinity of the first domain for CS1, BCMA, CD20, CD22, FLT3, CD123, CLL1, CHD3, MSLN, or EpCAM, preferably for human CS1, BCMA, CD20, CD22, FLT3, CD123, CLL1, CHD3, MSLN, or EpCAM, is preferably ≤100 nM or ≤50 nM, more preferably ≤25 nM or ≤20 nM, more preferably ≤15 nM or ≤10 nM, even more preferably ≤5 nM, even more preferably ≤2.5 nM or 2 nM, even more preferably ≤1 nM, even more preferably ≤0.6 nM, even more preferably ≤0.5 nM, and most preferably ≤0.4 nM. The affinity can be measured for example in a BIAcore assay or in a Scatchard assay. Other methods of determining the affinity are also well-known to the skilled person. The affinity of the first domain for macaque CS1, BCMA, CD20, CD22, FLT3, CD123, CLL1, CHD3, MSLN, or EpCAM is preferably ≤15 nM, more preferably ≤10 nM, even more preferably ≤5 nM, even more preferably ≤1 nM, even more preferably ≤0.5 nM, even more preferably ≤0.1 nM, and most preferably ≤0.05 nM or even ≤0.01 nM.

[0277] Preferably the affinity gap of the antigen-binding molecules according to the invention for binding macaque CS1, BCMA, CD20, CD22, FLT3, CD123, CLL1, CHD3, MSLN, or EpCAM versus human CS1, BCMA, CD20, CD22, FLT3, CD123, CLL1, CHD3, MSLN, or EpCAM [ma CS1, BCMA, CD20, CD22, FLT3, CD123, CLL1, CHD3, MSLN, or EpCAM: hu CS1, BCMA, CD20, CD22, FLT3, CD123, CLL1, CHD3, MSLN, or EpCAM (as determined e.g. by surface plasmon resonance analysis such as BiaCore™ or by Scatchard analysis) is ≤100, preferably ≤20, more preferably ≤15, further preferably ≤10, even more preferably ≤8, more preferably ≤6 and most preferably ≤2. Preferred ranges for the affinity gap of the antigen-binding molecules according to the invention for binding macaque CS1, BCMA, CD20, CD22, FLT3, CD123, CLL1, CHD3, MSLN, or EpCAM versus human CS1, BCMA, CD20, CD22, FLT3, CD123, CLL1, CHD3, MSLN, or EpCAM are between 0.1 and 20, more preferably between 0.2 and 10, even more preferably between 0.3 and 6, even more preferably between 0.5 and 3 or between 0.5 and 2.5, and most preferably between 0.5 and 2 or between 0.6 and 2.

[0278] The second and the fourth binding domain of the antigen-binding molecule of the invention typically binds to human CD3 epsilon and/or to Macaca CD3 epsilon. In a preferred embodiment, where a selectivity gap is achieved, the second and the fourth binding domain, or alternatively, the first and the third binding domain, further binds to Callithrix jacchus, Saguinus Oedipus or Saimiri sciureus CD3 epsilon. Callithrix jacchus and Saguinus oedipus are both new world primate belonging to the family of Callitrichidae, while Saimiri sciureus is a new world primate belonging to the family of Cebidae. Said binding domains may preferably selected form sequences identified herein as “I2L” (or synonymously “I2L0”), “12M” and “12M2”, more preferably as “12L” or “12L0”.

[0279] It is preferred for the antigen-binding molecule of the present invention that the preferably second and fourth binding domain which binds to an extracellular epitope of the human and/or the Macaca CD3 epsilon chain comprises a VL region comprising CDR-L1, CDR-L2 and CDR-L3 selected from:
[0280] (a) VL region comprising CDR-L1, CDR-L2 and CDR-L3 selected from SEQ ID NOs 40 to 42, 48 to 50, 56 to 58, 64 to 66, 72 to 74 439 to 441, preferably 64 to 66
[0281] (b) CDR-L1 as depicted in SEQ ID NO: 27 of WO 2008/119567, CDR-L2 as depicted in SEQ ID NO: 28 of WO 2008/119567 and CDR-L3 as depicted in SEQ ID NO: 29 of WO 2008/119567;
[0282] (c) CDR-L1 as depicted in SEQ ID NO: 117 of WO 2008/119567, CDR-L2 as depicted in SEQ ID NO: 118 of WO 2008/119567 and CDR-L3 as depicted in SEQ ID NO: 119 of WO 2008/119567;
[0283] (d) CDR-L1 as depicted in SEQ ID NO: 153 of WO 2008/119567, CDR-L2 as depicted in SEQ ID NO: 154 of WO 2008/119567 and CDR-L3 as depicted in SEQ ID NO: 155 of WO 2008/119567; and
[0284] (e) VL region comprising CDR-L1, CDR-L2 and CDR-L3 of SEQ ID NOs 420 to 422.

[0285] In a furthermore preferred embodiment of the antigen-binding molecule of the present invention, the preferably second and fourth binding domain which binds to an extracellular epitope of the human and/or the Macaca CD3 epsilon chain comprises a VH region comprising CDR-H 1, CDR-H2 and CDR-H3 selected from:
[0286] (a) VH region comprising CDR-H1, CDR-H2 and CDR-H3 selected from SEQ ID NOs 37 to 39, 45 to 47, 53 to 55, 61 to 63, 69 to 71 and 436 to 438, preferably 61 to 63;
[0287] (b) CDR-H1 as depicted in SEQ ID NO: 12 of WO 2008/119567, CDR-H2 as depicted in SEQ ID NO: 13 of WO 2008/119567 and CDR-H3 as depicted in SEQ ID NO: 14 of WO 2008/119567;
[0288] (c) CDR-H1 as depicted in SEQ ID NO: 30 of WO 2008/119567, CDR-H2 as depicted in SEQ ID NO: 31 of WO 2008/119567 and CDR-H3 as depicted in SEQ ID NO: 32 of WO 2008/119567;
[0289] (d) CDR-H1 as depicted in SEQ ID NO: 48 of WO 2008/119567, CDR-H2 as depicted in SEQ ID NO: 49 of WO 2008/119567 and CDR-H3 as depicted in SEQ ID NO: 50 of WO 2008/119567;
[0290] (e) CDR-H1 as depicted in SEQ ID NO: 66 of WO 2008/119567, CDR-H2 as depicted in SEQ ID NO: 67 of WO 2008/119567 and CDR-H3 as depicted in SEQ ID NO: 68 of WO 2008/119567;
[0291] (f) CDR-H1 as depicted in SEQ ID NO: 84 of WO 2008/119567, CDR-H2 as depicted in SEQ ID NO: 85 of WO 2008/119567 and CDR-H3 as depicted in SEQ ID NO: 86 of WO 2008/119567;
[0292] (g) CDR-H1 as depicted in SEQ ID NO: 102 of WO 2008/119567, CDR-H2 as depicted in SEQ ID NO: 103 of WO 2008/119567 and CDR-H3 as depicted in SEQ ID NO: 104 of WO 2008/119567;
[0293] (h) CDR-H1 as depicted in SEQ ID NO: 120 of WO 2008/119567, CDR-H2 as depicted in SEQ ID NO: 121 of WO 2008/119567 and CDR-H3 as depicted in SEQ ID NO: 122 of WO 2008/119567;
[0294] (i) CDR-H1 as depicted in SEQ ID NO: 138 of WO 2008/119567, CDR-H2 as depicted in SEQ ID NO: 139 of WO 2008/119567 and CDR-H3 as depicted in SEQ ID NO: 140 of WO 2008/119567;
[0295] (j) CDR-H1 as depicted in SEQ ID NO: 156 of WO 2008/119567, CDR-H2 as depicted in SEQ ID NO: 157 of WO 2008/119567 and CDR-H3 as depicted in SEQ ID NO: 158 of WO 2008/119567;
[0296] (k) CDR-H1 as depicted in SEQ ID NO: 174 of WO 2008/119567, CDR-H2 as depicted in SEQ ID NO: 175 of WO 2008/119567 and CDR-H3 as depicted in SEQ ID NO: 176 of WO 2008/119567; and
[0297] (l) VH region comprising CDR-H 1, CDR-H2 and CDR-H3 of SEQ ID NOs 423 to 425.

[0298] In a preferred embodiment of the antigen-binding molecule of the invention the above described three groups of VL CDRs are combined with the above described ten groups of VH CDRs within the third binding domain to form (30) groups, each comprising CDR-L 1-3 and CDR-H 1-3.

[0299] It is preferred for the antigen-binding molecule of the present invention that the third domain which binds to CD3 comprises a VL region selected from the group consisting of those depicted in SEQ ID NOs: 17, 21, 35, 39, 53, 57, 71, 75, 89, 93, 107, 111, 125, 129, 143, 147, 161, 165, 179 or 183 of WO 2008/119567 or, preferably, as depicted in SEQ ID NO: 44, 52, 60, 68 and 76, preferably 68 according to the present invention.

[0300] It is also preferred that the third domain which binds to CD3 comprises a VH region selected from the group consisting of those depicted in SEQ ID NO: 15, 19, 33, 37, 51, 55, 69, 73, 87, 91, 105, 109, 123, 127, 141, 145, 159, 163, 177 or 181 of WO 2008/119567 or, preferably, as depicted in SEQ ID NO: SEQ ID NOs 43, 51, 59, 67 and 75, preferably 67 according to the present invention.

[0301] More preferably, the antigen-binding molecule of the present invention is characterized by a preferably second and fourth domain which binds to CD3 comprising a VL region and a VH region selected from the group consisting of:
[0302] (a) a VL region selected from SEQ ID NOs 44, 52, 60, 68, 76 and 443, and a VH region selected from SEQ ID NOs 43, 51, 59, 67, 75 and 442;
[0303] (b) a VL region as depicted in SEQ ID NO: 17 or 21 of WO 2008/119567 and a VH region as depicted in SEQ ID NO: 15 or 19 of WO 2008/119567;
[0304] (c) a VL region as depicted in SEQ ID NO: 35 or 39 of WO 2008/119567 and a VH region as depicted in SEQ ID NO: 33 or 37 of WO 2008/119567;
[0305] (d) a VL region as depicted in SEQ ID NO: 53 or 57 of WO 2008/119567 and a VH region as depicted in SEQ ID NO: 51 or 55 of WO 2008/119567;
[0306] (e) a VL region as depicted in SEQ ID NO: 71 or 75 of WO 2008/119567 and a VH region as depicted in SEQ ID NO: 69 or 73 of WO 2008/119567;
[0307] (f) a VL region as depicted in SEQ ID NO: 89 or 93 of WO 2008/119567 and a VH region as depicted in SEQ ID NO: 87 or 91 of WO 2008/119567;
[0308] (g) a VL region as depicted in SEQ ID NO: 107 or 111 of WO 2008/119567 and a VH region as depicted in SEQ ID NO: 105 or 109 of WO 2008/119567;
[0309] (h) a VL region as depicted in SEQ ID NO: 125 or 129 of WO 2008/119567 and a VH region as depicted in SEQ ID NO: 123 or 127 of WO 2008/119567;
[0310] (i) a VL region as depicted in SEQ ID NO: 143 or 147 of WO 2008/119567 and a VH region as depicted in SEQ ID NO: 141 or 145 of WO 2008/119567;
[0311] (j) a VL region as depicted in SEQ ID NO: 161 or 165 of WO 2008/119567 and a VH region as depicted in SEQ ID NO: 159 or 163 of WO 2008/119567; and
[0312] (k) a VL region as depicted in SEQ ID NO: 179 or 183 of WO 2008/119567 and a VH region as depicted in SEQ ID NO: 177 or 181 of WO 2008/119567.

[0313] Also preferred in connection with the antigen-binding molecule of the present invention is a second and forth domain which binds to CD3 comprising a VL region as depicted in SEQ ID NO: 68 and a VH region as depicted in SEQ ID NO: 67.

[0314] According to a preferred embodiment of the antigen-binding molecule of the present invention, the first and/or the third domain have the following format: The pairs of VH regions and VL regions are in the format of a single chain antibody (scFv). The VH and VL regions are arranged in the order VH-VL or VL-VH. It is preferred that the VH-region is positioned N-terminally of a linker sequence, and the VL-region is positioned C-terminally of the linker sequence.

[0315] The invention further provides an antigen-binding molecule comprising or having an amino acid sequence (full bispecific antigen-binding molecule) selected from the group consisting of any of 673, 676, 679, 682, 685, 688, 691, 694, 697, 700, 703, 706, 709, 712, 715, 718, 721, 724, 727, 730, 733, 736, 739, 742, 745, 748, 751, 754, 757, 760, 763, 766, 769, 772, 775, 778, 781, 784, 787, 790, 793, 796, 799, 802, 805, 808, 811, 814, 817, 820, 823, 826, 829, 832, 835, 838, 841, 844, 847, 850, 853, 856, 859, 862, 865, 868, 871, 1437, 1440, 1443, 1446, 1449, 1452, 1455, 1458, 1461, 1464, 1467, 1470, 1473, 1476, 1479, 1482, 1485, 1488, 1499, 1667, 1670, 1673, 1676, 1679, 1682, 1685, 1688, 1691, 1694, 1697, 1700, 1703, 1706, 1709, 1712, 1715, 1718, 1721, 1724, 1727, 1730, 1733, 1736, 1739, 1742, 1745, 1748, 1751, 1754, 1757, 1760, 1763, 1766, 1769, 1772, 1775, 1778, 1781, 1784, 1787, 1790, 1793, 1796, 1799, 1802, 1805, 1808, 1811, 1814, 1817, 1820, 1823, 1826, and 1829, preferably 1437, or having an amino acid sequence having at least 90, 91, 92, 93, 94 95, 96, 97, 98 or 99% identity to said sequences.

[0316] Covalent modifications of the antigen-binding molecules are also included within the scope of this invention, and are generally, but not always, done post-translationally. For example, several types of covalent modifications of the antigen-binding molecule are introduced into the molecule by reacting specific amino acid residues of the antigen-binding molecule with an organic derivatizing agent that is capable of reacting with selected side chains or the N- or C-terminal residues.

[0317] Cysteinyl residues most commonly are reacted with α-haloacetates (and corresponding amines), such as chloroacetic acid or chloroacetamide, to give carboxymethyl or carboxyamidomethyl derivatives. Cysteinyl residues also are derivatized by reaction with bromotrifluoroacetone, α-bromo-μ-(5-imidozoyl)propionic acid, chloroacetyl phosphate, N-alkylmaleimides, 3-nitro-2-pyridyl disulfide, methyl 2-pyridyl disulfide, p-chloromercuribenzoate, 2-chloromercuri-4-nitrophenol, or chloro-7-nitrobenzo-2-oxa-1,3-diazole.

[0318] Histidyl residues are derivatized by reaction with diethylpyrocarbonate at pH 5.5-7.0 because this agent is relatively specific for the histidyl side chain. Para-bromophenacyl bromide also is useful; the reaction is preferably performed in 0.1 M sodium cacodylate at pH 6.0. Lysinyl and amino terminal residues are reacted with succinic or other carboxylic acid anhydrides. Derivatization with these agents has the effect of reversing the charge of the lysinyl residues. Other suitable reagents for derivatizing alpha-amino-containing residues include imidoesters such as methyl picolinimidate; pyridoxal phosphate; pyridoxal; chloroborohydride; trinitrobenzenesulfonic acid; O-methylisourea; 2,4-pentanedione; and transaminase-catalyzed reaction with glyoxylate.

[0319] Arginyl residues are modified by reaction with one or several conventional reagents, among them phenylglyoxal, 2,3-butanedione, 1,2-cyclohexanedione, and ninhydrin. Derivatization of arginine residues requires that the reaction be performed in alkaline conditions because of the high pKa of the guanidine functional group. Furthermore, these reagents may react with the groups of lysine as well as the arginine epsilon-amino group.

[0320] The specific modification of tyrosyl residues may be made, with particular interest in introducing spectral labels into tyrosyl residues by reaction with aromatic diazonium compounds or tetranitromethane. Most commonly, N-acetylimidizole and tetranitromethane are used to form O-acetyl tyrosyl species and 3-nitro derivatives, respectively. Tyrosyl residues are iodinated using ¹²⁵I or ¹³¹I to prepare labeled proteins for use in radioimmunoassay, the chloramine T method described above being suitable.

[0321] Carboxyl side groups (aspartyl or glutamyl) are selectively modified by reaction with carbodiimides (R′—N═C═N—R′), where R and R′ are optionally different alkyl groups, such as 1-cyclohexyl-3-(2-morpholinyl-4-ethyl) carbodiimide or 1-ethyl-3-(4-azonia-4,4-dimethylpentyl) carbodiimide. Furthermore, aspartyl and glutamyl residues are converted to asparaginyl and glutaminyl residues by reaction with ammonium ions.

[0322] Derivatization with bifunctional agents is useful for crosslinking the antigen-binding molecules of the present invention to a water-insoluble support matrix or surface for use in a variety of methods. Commonly used crosslinking agents include, e.g., 1,1-bis(diazoacetyl)-2-phenylethane, glutaraldehyde, N-hydroxysuccinimide esters, for example, esters with 4-azidosalicylic acid, homobifunctional imidoesters, including disuccinimidyl esters such as 3,3′-dithiobis(succinimidylpropionate), and bifunctional maleimides such as bis-N-maleimido-1,8-octane. Derivatizing agents such as methyl-3-[(p-azidophenyl)dithio]propioimidate yield photoactivatable intermediates that are capable of forming crosslinks in the presence of light. Alternatively, reactive water-insoluble matrices such as cyanogen bromide-activated carbohydrates and the reactive substrates as described in U.S. Pat. Nos. 3,969,287; 3,691,016; 4,195,128; 4,247,642; 4,229,537; and 4,330,440 are employed for protein immobilization.

[0323] Glutaminyl and asparaginyl residues are frequently deamidated to the corresponding glutamyl and aspartyl residues, respectively. Alternatively, these residues are deamidated under mildly acidic conditions. Either form of these residues falls within the scope of this invention.

[0324] Other modifications include hydroxylation of proline and lysine, phosphorylation of hydroxyl groups of seryl or threonyl residues, methylation of the α-amino groups of lysine, arginine, and histidine side chains (T. E. Creighton, Proteins: Structure and Molecular Properties, W. H. Freeman & Co., San Francisco, 1983, pp. 79-86), acetylation of the N-terminal amine, and amidation of any C-terminal carboxyl group.

[0325] Another type of covalent modification of the antigen-binding molecules included within the scope of this invention comprises altering the glycosylation pattern of the protein. As is known in the art, glycosylation patterns can depend on both the sequence of the protein (e.g., the presence or absence of particular glycosylation amino acid residues, discussed below), or the host cell or organism in which the protein is produced. Particular expression systems are discussed below.

[0326] Glycosylation of polypeptides is typically either N-linked or O-linked. N-linked refers to the attachment of the carbohydrate moiety to the side chain of an asparagine residue. The tri-peptide sequences asparagine-X-serine and asparagine-X-threonine, where X is any amino acid except proline, are the recognition sequences for enzymatic attachment of the carbohydrate moiety to the asparagine side chain. Thus, the presence of either of these tri-peptide sequences in a polypeptide creates a potential glycosylation site. O-linked glycosylation refers to the attachment of one of the sugars N-acetylgalactosamine, galactose, or xylose, to a hydroxyamino acid, most commonly serine or threonine, although 5-hydroxyproline or 5-hydroxylysine may also be used.

[0327] Addition of glycosylation sites to the antigen-binding molecule is conveniently accomplished by altering the amino acid sequence such that it contains one or more of the above-described tri-peptide sequences (for N-linked glycosylation sites). The alteration may also be made by the addition of, or substitution by, one or more serine or threonine residues to the starting sequence (for O-linked glycosylation sites). For ease, the amino acid sequence of an antigen-binding molecule is preferably altered through changes at the DNA level, particularly by mutating the DNA encoding the polypeptide at preselected bases such that codons are generated that will translate into the desired amino acids.

[0328] Another means of increasing the number of carbohydrate moieties on the antigen-binding molecule is by chemical or enzymatic coupling of glycosides to the protein. These procedures are advantageous in that they do not require production of the protein in a host cell that has glycosylation capabilities for N- and O-linked glycosylation. Depending on the coupling mode used, the sugar(s) may be attached to (a) arginine and histidine, (b) free carboxyl groups, (c) free sulfhydryl groups such as those of cysteine, (d) free hydroxyl groups such as those of serine, threonine, or hydroxyproline, (e) aromatic residues such as those of phenylalanine, tyrosine, or tryptophan, or (f) the amide group of glutamine. These methods are described in WO 87/05330, and in Aplin and Wriston, 1981, CRC Crit. Rev. Biochem., pp. 259-306.

[0329] Removal of carbohydrate moieties present on the starting antigen-binding molecule may be accomplished chemically or enzymatically. Chemical deglycosylation requires exposure of the protein to the compound trifluoromethanesulfonic acid, or an equivalent compound. This treatment results in the cleavage of most or all sugars except the linking sugar (N-acetylglucosamine or N-acetylgalactosamine), while leaving the polypeptide intact. Chemical deglycosylation is described by Hakimuddin et al., 1987, Arch. Biochem. Biophys. 259:52 and by Edge et al., 1981, Anal. Biochem. 118:131. Enzymatic cleavage of carbohydrate moieties on polypeptides can be achieved by the use of a variety of endo- and exo-glycosidases as described by Thotakura et al., 1987, Meth. Enzymol. 138:350. Glycosylation at potential glycosylation sites may be prevented by the use of the compound tunicamycin as described by Duskin et al., 1982, J. Biol. Chem. 257:3105. Tunicamycin blocks the formation of protein-N-glycoside linkages.

[0330] Other modifications of the antigen-binding molecule are also contemplated herein. For example, another type of covalent modification of the antigen-binding molecule comprises linking the antigen-binding molecule to various non-proteinaceous polymers, including, but not limited to, various polyols such as polyethylene glycol, polypropylene glycol, polyoxyalkylenes, or copolymers of polyethylene glycol and polypropylene glycol, in the manner set forth in U.S. Pat. Nos. 4,640,835; 4,496,689; 4,301,144; 4,670,417; 4,791,192 or 4,179,337. In addition, as is known in the art, amino acid substitutions may be made in various positions within the antigen-binding molecule, e.g. in order to facilitate the addition of polymers such as PEG.

[0331] In some embodiments, the covalent modification of the antigen-binding molecules of the invention comprises the addition of one or more labels. The labelling group may be coupled to the antigen-binding molecule via spacer arms of various lengths to reduce potential steric hindrance. Various methods for labelling proteins are known in the art and can be used in performing the present invention. The term “label” or “labelling group” refers to any detectable label. In general, labels fall into a variety of classes, depending on the assay in which they are to be detected—the following examples include, but are not limited to:
[0332] a) isotopic labels, which may be radioactive or heavy isotopes, such as radioisotopes or radionuclides (e.g., ³H, ¹⁴C, ¹⁵N, ³⁵S, ⁸⁹Zr, ⁹⁰Y, ⁹⁹Tc, ¹¹¹In, ¹²⁵I, ¹³¹I)
[0333] b) magnetic labels (e.g., magnetic particles)
[0334] c) redox active moieties
[0335] d) optical dyes (including, but not limited to, chromophores, phosphors and fluorophores) such as fluorescent groups (e.g., FITC, rhodamine, lanthanide phosphors), chemiluminescent groups, and fluorophores which can be either “small molecule” fluors or proteinaceous fluors
[0336] e) enzymatic groups (e.g. horseradish peroxidase, 0-galactosidase, luciferase, alkaline phosphatase) f) biotinylated groups
[0337] g) predetermined polypeptide epitopes recognized by a secondary reporter (e.g., leucine zipper pair sequences, binding sides for secondary antibodies, metal binding domains, epitope tags, etc.)

[0338] By “fluorescent label” is meant any molecule that may be detected via its inherent fluorescent properties. Suitable fluorescent labels include, but are not limited to, fluorescein, rhodamine, tetramethylrhodamine, eosin, erythrosin, coumarin, methyl-coumarins, pyrene, Malacite green, stilbene, Lucifer Yellow, Cascade BlueJ, Texas Red, IAEDANS, EDANS, BODIPY FL, LC Red 640, Cy 5, Cy 5.5, LC Red 705, Oregon green, the Alexa-Fluor dyes (Alexa Fluor 350, Alexa Fluor 430, Alexa Fluor 488, Alexa Fluor 546, Alexa Fluor 568, Alexa Fluor 594, Alexa Fluor 633, Alexa Fluor 660, Alexa Fluor 680), Cascade Blue, Cascade Yellow and R-phycoerythrin (PE) (Molecular Probes, Eugene, OR), FITC, Rhodamine, and Texas Red (Pierce, Rockford, IL), Cy5, Cy5.5, Cy7 (Amersham Life Science, Pittsburgh, PA). Suitable optical dyes, including fluorophores, are described in Molecular Probes Handbook by Richard P. Haugland.

[0339] Suitable proteinaceous fluorescent labels also include, but are not limited to, green fluorescent protein, including a Renilla, Ptilosarcus, or Aequorea species of GFP (Chalfie et al., 1994, Science 263:802-805), EGFP (Clontech Laboratories, Inc., Genbank Accession Number U55762), blue fluorescent protein (BFP, Quantum Biotechnologies, Inc. 1801 de Maisonneuve Blvd. West, 8th Floor, Montreal, Quebec, Canada H3H 119; Stauber, 1998, Biotechniques 24:462-471; Heim et al., 1996, Curr. Biol. 6:178-182), enhanced yellow fluorescent protein (EYFP, Clontech Laboratories, Inc.), luciferase (Ichiki et al., 1993, J. Immunol. 150:5408-5417), β galactosidase (Nolan et al., 1988, Proc. Natl. Acad. Sci. U.S.A. 85:2603-2607) and Renilla (WO92/15673, WO95/07463, WO98/14605, WO98/26277, WO99/49019, U.S. Pat. Nos. 5,292,658; 5,418,155; 5,683,888; 5,741,668; 5,777,079; 5,804,387; 5,874,304; 5,876,995; 5,925,558).

[0340] The antigen-binding molecule of the invention may also comprise additional domains, which are e.g. helpful in the isolation of the molecule or relate to an adapted pharmacokinetic profile of the molecule. Domains helpful for the isolation of an antigen-binding molecule may be selected from peptide motives or secondarily introduced moieties, which can be captured in an isolation method, e.g. an isolation column. Non-limiting embodiments of such additional domains comprise peptide motives known as Myc-tag, HAT-tag, HA-tag, TAP-tag, GST-tag, chitin binding domain (CBD-tag), maltose binding protein (MBP-tag), Flag-tag, Strep-tag and variants thereof (e.g. StrepIl-tag) and His-tag. All herein disclosed antigen-binding molecules may comprise a His-tag domain, which is generally known as a repeat of consecutive His residues in the amino acid sequence of a molecule, preferably of five, and more preferably of six His residues (hexa-histidine). The His-tag may be located e.g. at the N- or C-terminus of the antigen-binding molecule, preferably it is located at the C-terminus. Most preferably, a hexa-histidine tag (HHHHHH) (SEQ ID NO:16) is linked via peptide bond to the C-terminus of the antigen-binding molecule according to the invention. Additionally, a conjugate system of PLGA-PEG-PLGA may be combined with a poly-histidine tag for sustained release application and improved pharmacokinetic profile.

[0341] Amino acid sequence modifications of the antigen-binding molecules described herein are also contemplated. For example, it may be desirable to improve the binding affinity and/or other biological properties of the antigen-binding molecule. Amino acid sequence variants of the antigen-binding molecules are prepared by introducing appropriate nucleotide changes into the antigen-binding molecules nucleic acid, or by peptide synthesis. All of the below described amino acidacid sequence modifications should result in an antigen-binding molecule which still retains the desired biological activity (binding to CS1, BCMA, CD20, CD22, FLT3, CD123, CLL1, CHD3, MSLN, or EpCAM and to CD3) of the unmodified parental molecule.

[0342] The term “amino acid” or “amino acid residue” typically refers to an amino acid having its art recognized definition such as an amino acid selected from the group consisting of: alanine (Ala or A); arginine (Arg or R); asparagine (Asn or N); aspartic acid (Asp or D); cysteine (Cys or C); glutamine (GIn or Q); glutamic acid (GIu or E); glycine (GIy or G); histidine (His or H); isoleucine (He or I): leucine (Leu or L); lysine (Lys or K); methionine (Met or M); phenylalanine (Phe or F); pro line (Pro or P); serine (Ser or S); threonine (Thr or T); tryptophan (Trp or W); tyrosine (Tyr or Y); and valine (Val or V), although modified, synthetic, or rare amino acids may be used as desired. Generally, amino acids can be grouped as having a nonpolar side chain (e.g., Ala, Cys, He, Leu, Met, Phe, Pro, Val); a negatively charged side chain (e.g., Asp, GIu); a positively charged sidechain (e.g., Arg, His, Lys); or an uncharged polar side chain (e.g., Asn, Cys, GIn, GIy, His, Met, Phe, Ser, Thr, Trp, and Tyr).

[0343] Amino acid modifications include, for example, deletions from, and/or insertions into, and/or substitutions of, residues within the amino acid sequences of the antigen-binding molecules. Any combination of deletion, insertion, and substitution is made to arrive at the final construct, provided that the final construct possesses the desired characteristics. The amino acid changes also may alter post-translational processes of the antigen-binding molecules, such as changing the number or position of glycosylation sites.

[0344] For example, 1, 2, 3, 4, 5, or 6 amino acids may be inserted, substituted or deleted in each of the CDRs (of course, dependent on their length), while 1, 2, 3, 4, 5, 6, 7, 8, 9, 10, 11, 12, 13, 14, 15, 16, 17, 18, 19, 20, or 25 amino acids may be inserted, substituted or deleted in each of the FRs. Preferably, amino acid sequence insertions into the antigen-binding molecule include amino- and/or carboxyl-terminal fusions ranging in length from 1, 2, 3, 4, 5, 6, 7, 8, 9 or 10 residues to polypeptides containing a hundred or more residues, as well as intra-sequence insertions of single or multiple amino acid residues. An insertional variant of the antigen-binding molecule of the invention includes the fusion to the N-terminus or to the C-terminus of the antigen-binding molecule of an enzyme or the fusion to a polypeptide.

[0345] The sites of greatest interest for substitutional mutagenesis include (but are not limited to) the CDRs of the heavy and/or light chain, in particular the hypervariable regions, but FR alterations in the heavy and/or light chain are also contemplated. The substitutions are preferably conservative substitutions as described herein. Preferably, 1, 2, 3, 4, 5, 6, 7, 8, 9, or 10 amino acids may be substituted in a CDR, while 1, 2, 3, 4, 5, 6, 7, 8, 9, 10, 11, 12, 13, 14, 15, 16, 17, 18, 19, 20, or 25 amino acids may be substituted in the framework regions (FRs), depending on the length of the CDR or FR. For example, if a CDR sequence encompasses 6 amino acids, it is envisaged that one, two or three of these amino acids are substituted. Similarly, if a CDR sequence encompasses 15 amino acids it is envisaged that one, two, three, four, five or six of these amino acids are substituted.

[0346] A useful method for identification of certain residues or regions of the antigen-binding molecules that are preferred locations for mutagenesis is called “alanine scanning mutagenesis” as described by Cunningham and Wells in Science, 244: 1081-1085 (1989). Here, a residue or group of target residues within the antigen-binding molecule is/are identified (e.g. charged residues such as arg, asp, his, lys, and glu) and replaced by a neutral or negatively charged amino acid (most preferably alanine or polyalanine) to affect the interaction of the amino acids with the epitope.

[0347] Those amino acid locations demonstrating functional sensitivity to the substitutions are then refined by introducing further or other variants at, or for, the sites of substitution. Thus, while the site or region for introducing an amino acid sequence variation is predetermined, the nature of the mutation per se needs not to be predetermined. For example, to analyze or optimize the performance of a mutation at a given site, alanine scanning or random mutagenesis may be conducted at a target codon or region, and the expressed antigen-binding molecule variants are screened for the optimal combination of desired activity. Techniques for making substitution mutations at predetermined sites in the DNA having a known sequence are well known, for example, M13 primer mutagenesis and PCR mutagenesis. Screening of the mutants is done using assays of antigen binding activities, such as CS1, BCMA, CD20, CD22, FLT3, CD123, CLL1, CHD3, MSLN, or EpCAM or CD3 binding.

[0348] Generally, if amino acids are substituted in one or more or all of the CDRs of the heavy and/or light chain, it is preferred that the then-obtained “substituted” sequence is at least 60% or 65%, more preferably 70% or 75%, even more preferably 80% or 85%, and particularly preferably 90% or 95% identical to the “original” CDR sequence. This means that it is dependent of the length of the CDR to which degree it is identical to the “substituted” sequence. For example, a CDR having 5 amino acids is preferably 80% identical to its substituted sequence in order to have at least one amino acid substituted. Accordingly, the CDRs of the antigen-binding molecule may have different degrees of identity to their substituted sequences, e.g., CDRL1 may have 80%, while CDRL3 may have 90%.

[0349] Preferred substitutions (or replacements) are conservative substitutions. However, any substitution (including non-conservative substitution or one or more from the “exemplary substitutions” listed in Table 3, below) is envisaged as long as the antigen-binding molecule retains its capability to bind to CS1, BCMA, CD20, CD22, FLT3, CD123, CLL1, CHD3, MSLN, or EpCAM via the first domain and to CD3 epsilon via the second domain and/or its CDRs have an identity to the then substituted sequence (at least 60% or 65%, more preferably 70% or 75%, even more preferably 80% or 85%, and particularly preferably 90% or 95% identical to the “original” CDR sequence).

[0350] Conservative substitutions are shown in Table 3 under the heading of “preferred substitutions”. If such substitutions result in a change in biological activity, then more substantial changes, denominated “exemplary substitutions” in Table 3, or as further described below in reference to amino acid classes, may be introduced and the products screened for a desired characteristic.

TABLE 3
Amino acid substitutions

| Original | Exemplary Substitutions | Preferred Substitutions |
|---|---|---|
| Ala (A) | val, leu, ile | Val |
| Arg (R) | lys, gln, asn | Lys |
| Asn (N) | gln, his, asp, lys, arg | Gln |
| Asp (D) | glu, asn | Glu |
| Cys (C) | ser, ala | ser |
| Gln (Q) | asn, glu | asn |
| Glu (E) | asp, gln | asp |
| Gly (G) | Ala | ala |
| His (H) | asn, gln, lys, arg | arg |
| Ile (I) | leu, val, met, ala, phe | leu |
| Leu (L) | norleucine, ile, val, met, ala | ile |
| Lys (K) | arg, gln, asn | arg |
| Met (M) | leu, phe, ile | leu |
| Phe (F) | leu, val, ile, ala, tyr | tyr |
| Pro (P) | Ala | ala |
| Ser (S) | Thr | thr |
| Thr (T) | Ser | ser |
| Trp (W) | tyr, phe | tyr |
| Tyr (Y) | trp, phe, thr, ser | phe |
| Val (V) | ile, leu, met, phe, ala | leu |

[0351] Substantial modifications in the biological properties of the antigen-binding molecule of the present invention are accomplished by selecting substitutions that differ significantly in their effect on maintaining (a) the structure of the polypeptide backbone in the area of the substitution, for example, as a sheet or helical conformation, (b) the charge or hydrophobicity of the molecule at the target site, or (c) the bulk of the side chain. Naturally occurring residues are divided into groups based on common side-chain properties: (1) hydrophobic: norleucine, met, ala, val, leu, ile; (2) neutral hydrophilic: cys, ser, thr; asn, gin (3) acidic: asp, glu; (4) basic: his, lys, arg; (5) residues that influence chain orientation: gly, pro; and (6) aromatic: trp, tyr, phe.

[0352] Non-conservative substitutions will entail exchanging a member of one of these classes for another class. Any cysteine residue not involved in maintaining the proper conformation of the antigen-binding molecule may be substituted, generally with serine, to improve the oxidative stability of the molecule and prevent aberrant crosslinking. Conversely, cysteine bond(s) may be added to the antibody to improve its stability (particularly where the antibody is an antibody fragment such as an Fv fragment).

[0353] For amino acid sequences, sequence identity and/or similarity is determined by using standard techniques known in the art, including, but not limited to, the local sequence identity algorithm of Smith and Waterman, 1981, Adv. Appl. Math. 2:482, the sequence identity alignment algorithm of Needleman and Wunsch, 1970, J. Mol. Biol. 48:443, the search for similarity method of Pearson and Lipman, 1988, Proc. Nat. Acad. Sci. U.S.A. 85:2444, computerized implementations of these algorithms (GAP, BESTFIT, FASTA, and TFASTA in the Wisconsin Genetics Software Package, Genetics Computer Group, 575 Science Drive, Madison, Wis.), the Best Fit sequence program described by Devereux et al., 1984, Nucl. Acid Res. 12:387-395, preferably using the default settings, or by inspection. Preferably, percent identity is calculated by FastDB based upon the following parameters: mismatch penalty of 1; gap penalty of 1; gap size penalty of 0.33; and joining penalty of 30, “Current Methods in Sequence Comparison and Analysis,” Macromolecule Sequencing and Synthesis, Selected Methods and Applications, pp 127-149 (1988), Alan R. Liss, Inc.

[0354] An example of a useful algorithm is PILEUP. PILEUP creates a multiple sequence alignment from a group of related sequences using progressive, pairwise alignments. It can also plot a tree showing the clustering relationships used to create the alignment. PILEUP uses a simplification of the progressive alignment method of Feng & Doolittle, 1987, J. Mol. Evol. 35:351-360; the method is similar to that described by Higgins and Sharp, 1989, CABIOS 5:151-153. Useful PILEUP parameters including a default gap weight of 3.00, a default gap length weight of 0.10, and weighted end gaps.

[0355] Another example of a useful algorithm is the BLAST algorithm, described in: Altschul et al., 1990, J. Mol. Biol. 215:403-410; Altschul et al., 1997, Nucleic Acids Res. 25:3389-3402; and Karin et al., 1993, Proc. Natl. Acad. Sci. U.S.A. 90:5873-5787. A particularly useful BLAST program is the WU-BLAST-2 program which was obtained from Altschul et al., 1996, Methods in Enzymology 266:460-480. WU-BLAST-2 uses several search parameters, most of which are set to the default values. The adjustable parameters are set with the following values: overlap span=1, overlap fraction=0.125, word threshold (T)=II. The HSP S and HSP S2 parameters are dynamic values and are established by the program itself depending upon the composition of the particular sequence and composition of the particular database against which the sequence of interest is being searched; however, the values may be adjusted to increase sensitivity.

[0356] An additional useful algorithm is gapped BLAST as reported by Altschul et al., 1993, Nucl. Acids Res. 25:3389-3402. Gapped BLAST uses BLOSUM-62 substitution scores; threshold T parameter set to 9; the two-hit method to trigger ungapped extensions, charges gap lengths of k a cost of 10⁺k; Xu set to 16, and Xg set to 40 for database search stage and to 67 for the output stage of the algorithms. Gapped alignments are triggered by a score corresponding to about 22 bits.

[0357] Generally, the amino acid homology, similarity, or identity between individual variant CDRs or VH/VL sequences are at least 60% to the sequences depicted herein, and more typically with preferably increasing homologies or identities of at least 65% or 70%, more preferably at least 75% or 80%, even more preferably at least 85%, 90%, 91%, 92%, 93%, 94%, 95%, 96%, 97%, 98%, 99%, and almost 100%. In a similar manner, “percent (%) nucleic acid sequence identity” with respect to the nucleic acid sequence of the binding proteins identified herein is defined as the percentage of nucleotide residues in a candidate sequence that are identical with the nucleotide residues in the coding sequence of the antigen-binding molecule. A specific method utilizes the BLASTN module of WU-BLAST-2 set to the default parameters, with overlap span and overlap fraction set to 1 and 0.125, respectively.

[0358] Generally, the nucleic acid sequence homology, similarity, or identity between the nucleotide sequences encoding individual variant CDRs or VH/VL sequences and the nucleotide sequences depicted herein are at least 60%, and more typically with preferably increasing homologies or identities of at least 65%, 70%, 75%, 80%, 81%, 82%, 83%, 84%, 85%, 86%, 87%, 88%, 89%, 90%, 91%, 92%, 93%, 94%, 95%, 96%, 97%, 98%, or 99%, and almost 100%. Thus, a “variant CDR” or a “variant VH/VL region” is one with the specified homology, similarity, or identity to the parent CDR/VH/VL of the invention, and shares biological function, including, but not limited to, at least 60%, 65%, 70%, 75%, 80%, 81%, 82%, 83%, 84%, 85%, 86%, 87%, 88%, 89%, 90%, 91%, 92%, 93%, 94%, 95%, 96%, 97%, 98%, or 99% of the specificity and/or activity of the parent CDR or VH/VL.

[0359] In one embodiment, the percentage of identity to human germline of the antigen-binding molecules according to the invention is ≥70% or ≥75%, more preferably ≥80% or ≥85%, even more preferably ≥90%, and most preferably ≥91%, ≥92%, ≥93%, ≥94%, ≥95% or even ≥96%. Identity to human antibody germline gene products is thought to be an important feature to reduce the risk of therapeutic proteins to elicit an immune response against the drug in the patient during treatment. Hwang & Foote (“Immunogenicity of engineered antibodies”; Methods 36 (2005) 3-10) demonstrate that the reduction of non-human portions of drug antigen-binding molecules leads to a decrease of risk to induce anti-drug antibodies in the patients during treatment. By comparing an exhaustive number of clinically evaluated antibody drugs and the respective immunogenicity data, the trend is shown that humanization of the V-regions of antibodies makes the protein less immunogenic (average 5.1% of patients) than antibodies carrying unaltered non-human V regions (average 23.59% of patients). A higher degree of identity to human sequences is hence desirable for V-region based protein therapeutics in the form of antigen-binding molecules. For this purpose of determining the germline identity, the V-regions of VL can be aligned with the amino acid sequences of human germline V segments and J segments (http://vbase.mrc-cpe.cam.ac.uk/) using Vector NTI software and the amino acid sequence calculated by dividing the identical amino acid residues by the total number of amino acid residues of the VL in percent. The same can be for the VH segments (http://vbase.mrc-cpe.cam.ac.uk/) with the exception that the VH CDR3 may be excluded due to its high diversity and a lack of existing human germline VH CDR3 alignment partners. Recombinant techniques can then be used to increase sequence identity to human antibody germline genes.

[0360] In a further embodiment, the bispecific antigen-binding molecules of the present invention exhibit high monomer yields under standard research scale conditions, e.g., in a standard two-step purification process. Preferably the monomer yield of the antigen-binding molecules according to the invention is ≥0.25 mg/L supernatant, more preferably ≥0.5 mg/L, even more preferably ≥1 mg/L, and most preferably ≥3 mg/L supernatant.

[0361] Likewise, the yield of the dimeric antigen-binding molecule isoforms and hence the monomer percentage (i.e., monomer: (monomer+dimer)) of the antigen-binding molecules can be determined. The productivity of monomeric and dimeric antigen-binding molecules and the calculated monomer percentage can e.g. be obtained in the SEC purification step of culture supernatant from standardized research-scale production in roller bottles. In one embodiment, the monomer percentage of the antigen-binding molecules is ≥80%, more preferably ≥85%, even more preferably ≥90%, and most preferably ≥95%.

[0362] In one embodiment, the antigen-binding molecules have a preferred plasma stability (ratio of EC50 with plasma to EC50 w/o plasma) of ≤5 or ≤4, more preferably ≤3.5 or ≤3, even more preferably ≤2.5 or ≤2, and most preferably ≤1.5 or ≤1. The plasma stability of an antigen-binding molecule can be tested by incubation of the construct in human plasma at 37° C. for 24 hours followed by EC50 determination in a ⁵¹chromium release cytotoxicity assay. The effector cells in the cytotoxicity assay can be stimulated enriched human CD8 positive T cells. Target cells can e.g. be CHO cells transfected with human CS1, BCMA, CD20, CD22, FLT3, CD123, CLL1, CHD3, MSLN, or EpCAM. The effector to target cell (E:T) ratio can be chosen as 10:1 or 5:1. The human plasma pool used for this purpose is derived from the blood of healthy donors collected by EDTA coated syringes. Cellular components are removed by centrifugation and the upper plasma phase is collected and subsequently pooled. As control, antigen-binding molecules are diluted immediately prior to the cytotoxicity assay in RPMI-1640 medium. The plasma stability is calculated as ratio of EC50 (after plasma incubation) to EC50 (control).

[0363] It is furthermore preferred that the monomer to dimer conversion of antigen-binding molecules of the invention is low. The conversion can be measured under different conditions and analyzed by high performance size exclusion chromatography. For example, incubation of the monomeric isoforms of the antigen-binding molecules can be carried out for 7 days at 37° C. and concentrations of e.g. 100 g/ml or 250 g/ml in an incubator. Under these conditions, it is preferred that the antigen-binding molecules of the invention show a dimer percentage that is ≤5%, more preferably ≤4%, even more preferably ≤3%, even more preferably ≤2.5%, even more preferably 2%, even more preferably ≤1.5%, and most preferably ≤1% or ≤0.5% or even 0%.

[0364] It is also preferred that the bispecific antigen-binding molecules of the present invention present with very low dimer conversion after a number of freeze/thaw cycles. For example, the antigen-binding molecule monomer is adjusted to a concentration of 250 g/ml e.g. in generic formulation buffer and subjected to three freeze/thaw cycles (freezing at −80° C. for 30 mm followed by thawing for 30 min at room temperature), followed by high performance SEC to determine the percentage of initially monomeric antigen-binding molecule, which had been converted into dimeric antigen-binding molecule. Preferably the dimer percentages of the bispecific antigen-binding molecules are ≤5%, more preferably ≤4%, even more preferably ≤3%, even more preferably ≤2.5%, even more preferably ≤2%, even more preferably ≤1.5%, and most preferably ≤1% or even 0.5%, for example after three freeze/thaw cycles.

[0365] The bispecific antigen-binding molecules of the present invention preferably show a favorable thermostability with aggregation temperatures ≥45° C. or ≥50° C., more preferably ≥52° C. or ≥54° C., even more preferably ≥56° C. or ≥57° C., and most preferably ≥58° C. or ≥59° C. The thermostability parameter can be determined in terms of antibody aggregation temperature as follows: Antibody solution at a concentration 250 μg/ml is transferred into a single use cuvette and placed in a Dynamic Light Scattering (DLS) device. The sample is heated from 40° C. to 70° C. at a heating rate of 0.5° C./min with constant acquisition of the measured radius. Increase of radius indicating melting of the protein and aggregation is used to calculate the aggregation temperature of the antibody.

[0366] Alternatively, temperature melting curves can be determined by Differential Scanning Calorimetry (DSC) to determine intrinsic biophysical protein stabilities of the antigen-binding molecules. These experiments are performed using a MicroCal LLC (Northampton, MA, U.S.A) VP-DSC device. The energy uptake of a sample containing an antigen-binding molecule is recorded from 20° C. to 90° C. compared to a sample containing only the formulation buffer. The antigen-binding molecules are adjusted to a final concentration of 250 g/ml e.g. in SEC running buffer. For recording of the respective melting curve, the overall sample temperature is increased stepwise. At each temperature T energy uptake of the sample and the formulation buffer reference is recorded. The difference in energy uptake Cp (kcal/mole/° C.) of the sample minus the reference is plotted against the respective temperature. The melting temperature is defined as the temperature at the first maximum of energy uptake.

[0367] The CS1, BCMA, CD20, CD22, FLT3, CD123, CLL1, CHD3, MSLN, or EpCAMxCD3 bispecific antigen-binding molecules of the invention are also envisaged to have a turbidity (as measured by OD340 after concentration of purified monomeric antigen-binding molecule to 2.5 mg/ml and overnight incubation) of ≤0.2, preferably of ≤0.15, more preferably of ≤0.12, even more preferably of ≤0.1, and most preferably of ≤0.08.

[0368] In a further embodiment the antigen-binding molecule according to the invention is stable at physiologic or slightly lower pH, i.e. about pH 7.4 to 6.0. The more tolerant the antigen-binding molecule behaves at unphysiologic pH such as about pH 6.0, the higher is the recovery of the antigen-binding molecule eluted from an ion exchange column relative to the total amount of loaded protein. Recovery of the antigen-binding molecule from an ion (e.g., cation) exchange column at about pH 6.0 is preferably ≥30%, more preferably ≥40%, more preferably ≥50%, even more preferably ≥60%, even more preferably ≥70%, even more preferably ≥80%, even more preferably ≥90%, even more preferably ≥95%, and most preferably ≥99%.

[0369] It is furthermore envisaged that the bispecific antigen-binding molecules of the present invention exhibit therapeutic efficacy or anti-tumor activity. This can e.g. be assessed in a study as disclosed in the following generalized example of an advanced stage human tumor xenograft model:

[0370] On day 1 of the study, 5×10⁶ cells of a human target cell antigen (here: CS1, BCMA, CD20, CD22, FLT3, CD123, CLL1, CHD3, MSLN, or EpCAM) positive cancer cell line are subcutaneously injected in the right dorsal flank of female NOD/SCID mice. When the mean tumor volume reaches about 100 mm³, in vitro expanded human CD3 positive T cells are transplanted into the mice by injection of about 2×10⁷ cells into the peritoneal cavity of the animals. Mice of vehicle control group 1 do not receive effector cells and are used as an untransplanted control for comparison with vehicle control group 2 (receiving effector cells) to monitor the impact of T cells alone on tumor growth. The treatment with a bispecific antigen-binding molecule starts when the mean tumor volume reaches about 200 mm³. The mean tumor size of each treatment group on the day of treatment start should not be statistically different from any other group (analysis of variance). Mice are treated with 0.5 mg/kg/day of a CS1, BCMA, CD20, CD22, FLT3, CD123, CLL1, CHD3, MSLN, or EpCAM andCD3 bispecific antigen-binding molecule by intravenous bolus injection for about 15 to 20 days. Tumors are measured by caliper during the study and progress evaluated by intergroup comparison of tumor volumes (TV). The tumor growth inhibition T/C [%] is determined by calculating TV as T/C %=100× (median TV of analyzed group)/(median TV of control group 2).

[0371] The skilled person knows how to modify or adapt certain parameters of this study, such as the number of injected tumor cells, the site of injection, the number of transplanted human T cells, the amount of bispecific antigen-binding molecules to be administered, and the timelines, while still arriving at a meaningful and reproducible result. Preferably, the tumor growth inhibition T/C [%] is ≤70 or ≤60, more preferably ≤50 or ≤40, even more preferably ≤30 or ≤20 and most preferably ≤10 or ≤5 or even ≤2.5. Tumor growth inhibition is preferably close to 100%.

[0372] In a preferred embodiment of the antigen-binding molecule of the invention the antigen-binding molecule is a single chain antigen-binding molecule.

[0373] Also in a preferred embodiment of the antigen-binding molecule of the invention said spacer comprises in an amino to carboxyl order:

[chemical structure]

[0374] In one embodiment of the invention each of said polypeptide monomers of the spacer has an amino acid sequence that is at least 90% identical to a sequence selected from the group consisting of: SEQ ID NO: 17-24. In a preferred embodiment or the invention each of said polypeptide monomers has an amino acid sequence selected from SEQ ID NO: 17-24.

[0375] Also in one embodiment of the invention the CH2 domain of one or preferably each (both) polypeptide monomers of the spacer comprises an intra domain cysteine disulfide bridge. As known in the art the term “cysteine disulfide bridge” refers to a functional group with the general structure R—S—S—R. The linkage is also called an SS-bond or a disulfide bridge and is derived by the coupling of two thiol groups of cysteine residues. It is particularly preferred for the antigen-binding molecule of the invention that the cysteines forming the cysteine disulfide bridge in the mature antigen-binding molecule are introduced into the amino acid sequence of the CH2 domain corresponding to 309 and 321 (Kabat numbering).

[0376] In one embodiment of the invention a glycosylation site in Kabat position 314 of the CH2 domain is removed. It is preferred that this removal of the glycosylation site is achieved by a N314X substitution, wherein X is any amino acid excluding Q. Said substitution is preferably a N314G. In a more preferred embodiment, said CH2 domain additionally comprises the following substitutions (position according to Kabat) V321C and R309C (these substitutions introduce the intra domain cysteine disulfide bridge at Kabat positions 309 and 321).

[0377] It is assumed that the preferred features of the antigen-binding molecule of the invention compared e.g. to the bispecific heteroFc antigen-binding molecule known in the art may be inter alia related to the introduction of the above described modifications in the CH2 domain. Thus, it is preferred for the construct of the invention that the CH2 domains in the spacer of the antigen-binding molecule of the invention comprise the intra domain cysteine disulfide bridge at Kabat positions 309 and 321 and/or the glycosylation site at Kabat position 314 is removed, preferably by a N314G substitution.

[0378] In a further preferred embodiment of the invention the CH2 domains in the spacer of the antigen-binding molecule of the invention comprise the intra domain cysteine disulfide bridge at Kabat positions 309 and 321 and the glycosylation site at Kabat position 314 is removed by a N314G substitution. Most preferably, the polypeptide monomer of the spacer of the antigen-binding molecule of the invention has an amino acid sequence selected from the group consisting of SEQ ID NO: 17 and 18.

[0379] In one embodiment the invention provides an antigen-binding molecule, wherein:
[0380] (i) the first domain comprises two antibody variable domains and the second domain comprises two antibody variable domains;
[0381] (ii) the first domain comprises one antibody variable domain and the second domain comprises two antibody variable domains;
[0382] (iii) the first domain comprises two antibody variable domains and the second domain comprises one antibody variable domain; or
[0383] (iv) the first domain comprises one antibody variable domain and the second domain comprises one antibody variable domain.

[0384] Accordingly, the first and the second domain may be binding domains comprising each two antibody variable domains such as a VH and a VL domain. Examples for such binding domains comprising two antibody variable domains where described herein above and comprise e.g. Fv fragments, scFv fragments or Fab fragments described herein above. Alternatively, either one or both of those binding domains may comprise only a single variable domain. Examples for such single domain binding domains where described herein above and comprise e.g. nanobodies or single variable domain antibodies comprising merely one variable domain, which may be VHH, VH or VL, that specifically bind an antigen or epitope independently of other V regions or domains.

[0385] In a preferred embodiment of the antigen-binding molecule of the invention second and third binding domain are fused to the spacer via a peptide linker. Preferred peptide linker have been described herein above and are characterized by the amino acid sequence Gly-Gly-Gly-Gly-Ser, i.e. Gly₄Ser (SEQ ID NO: 7), or polymers thereof, i.e. (Gly₄Ser)x, where x is an integer of 1 or greater (e.g. 2 or 3). A particularly preferred linker for the fusion of the first and second domain to the spacer is depicted in SEQ ID NO: 7.

[0386] The antigen-binding molecule of the present invention comprises a first domain which binds to CS1, BCMA, CD20, CD22, FLT3, CD123, CLL1, CHD3, MSLN, or EpCAM, preferably to the extracellular domain(s) (ECD) of CS1, BCMA, CD20, CD22, FLT3, CD123, CLL1, CHD3, MSLN, or EpCAM. It is understood that the term “binding to the extracellular domain of CS1, BCMA, CD20, CD22, FLT3, CD123, CLL1, CHD3, MSLN, or EpCAM”, in the context of the present invention, implies that the binding domain binds to CS1, BCMA, CD20, CD22, FLT3, CD123, CLL1, CHD3, MSLN, or EpCAM expressed on the surface of a target cell. The first domain according to the invention hence preferably binds to CS1, BCMA, CD20, CD22, FLT3, CD123, CLL1, CHD3, MSLN, or EpCAM when itis expressed by naturally expressing cells or cell lines, and/or by cells or cell lines transformed or (stably/transiently) transfected with CS1, BCMA, CD20, CD22, FLT3, CD123, CLL1, CHD3, MSLN, or EpCAM. In a preferred embodiment the first binding domain also binds to CS1, BCMA, CD20, CD22, FLT3, CD123, CLL1, CHD3, MSLN, or EpCAM when CS1, BCMA, CD20, CD22, FLT3, CD123, CLL1, CHD3, MSLN, or EpCAM is used as a “target” or “ligand” molecule in an in vitro binding assay such as BIAcore or Scatchard. The “target cell” can be any prokaryotic or eukaryotic cell expressing CS1, BCMA, CD20, CD22, FLT3, CD123, CLL1, CHD3, MSLN, or EpCAM on its surface; preferably the target cell is a cell that is part of the human or animal body, such as a specific CS1, BCMA, CD20, CD22, FLT3, CD123, CLL1, CHD3, MSLN, or EpCAM expressing cancer or tumor cell.

[0387] Preferably, the first binding domain binds to human CS1, BCMA, CD20, CD22, FLT3, CD123, CLL1, CHD3, MSLN, or EpCAM/CS1, BCMA, CD20, CD22, FLT3, CD123, CLL1, CHD3, MSLN, or EpCAM ECD. In a further preferred embodiment, it binds to macaque CS1, BCMA, CD20, CD22, FLT3, CD123, CLL1, CHD3, MSLN, or EpCAM/CS1, BCMA, CD20, CD22, FLT3, CD123, CLL1, CHD3, MSLN, or EpCAM ECD. According to the most preferred embodiment, it binds to both the human and the macaque CS1, BCMA, CD20, CD22, FLT3, CD123, CLL1, CHD3, MSLN, or EpCAM/CS1, BCMA, CD20, CD22, FLT3, CD123, CLL1, CHD3, MSLN, or EpCAM ECD. The “CS1, BCMA, CD20, CD22, FLT3, CD123, CLL1, CHD3, MSLN, or EpCAM extracellular domain” or “CS1, BCMA, CD20, CD22, FLT3, CD123, CLL1, CHD3, MSLN, or EpCAM ECD” refers to the CS1, BCMA, CD20, CD22, FLT3, CD123, CLL1, CHD3, MSLN, or EpCAM region or sequence which is essentially free of transmembrane and cytoplasmic domains of CS1, BCMA, CD20, CD22, FLT3, CD123, CLL1, CHD3, MSLN, or EpCAM. It will be understood by the skilled artisan that the transmembrane domain identified for the CS1, BCMA, CD20, CD22, FLT3, CD123, CLL1, CHD3, MSLN, or EpCAM polypeptide of the present invention is identified pursuant to criteria routinely employed in the art for identifying that type of hydrophobic domain. The exact boundaries of a transmembrane domain may vary but most likely by no more than about 5 amino acids at either end of the domain specifically mentioned herein.

[0388] Preferred binding domains which bind to CD3 are disclosed in WO 2010/037836, and WO 2011/121110. Any binding domain for CD3 described in these applications may be used in the context of the present invention.

[0389] The invention further provides a polynucleotide/nucleic acid molecule encoding an antigen-binding molecule of the invention. A polynucleotide is a biopolymer composed of 13 or more nucleotide monomers covalently bonded in a chain. DNA (such as cDNA) and RNA (such as mRNA) are examples of polynucleotides with distinct biological function. Nucleotides are organic molecules that serve as the monomers or subunits of nucleic acid molecules like DNA or RNA. The nucleic acid molecule or polynucleotide can be double stranded and single stranded, linear and circular. It is preferably comprised in a vector which is preferably comprised in a host cell. Said host cell is, e.g. after transformation or transfection with the vector or the polynucleotide of the invention, capable of expressing the antigen-binding molecule. For that purpose the polynucleotide or nucleic acid molecule is operatively linked with control sequences.

[0390] The genetic code is the set of rules by which information encoded within genetic material (nucleic acids) is translated into proteins. Biological decoding in living cells is accomplished by the ribosome which links amino acids in an order specified by mRNA, using tRNA molecules to carry amino acids and to read the mRNA three nucleotides at a time. The code defines how sequences of these nucleotide triplets, called codons, specify which amino acid will be added next during protein synthesis. With some exceptions, a three-nucleotide codon in a nucleic acid sequence specifies a single amino acid. Because the vast majority of genes are encoded with exactly the same code, this particular code is often referred to as the canonical or standard genetic code. While the genetic code determines the protein sequence for a given coding region, other genomic regions can influence when and where these proteins are produced.

[0391] Furthermore, the invention provides a vector comprising a polynucleotide/nucleic acid molecule of the invention. A vector is a nucleic acid molecule used as a vehicle to transfer (foreign) genetic material into a cell. The term “vector” encompasses—but is not restricted to—plasmids, viruses, cosmids and artificial chromosomes. In general, engineered vectors comprise an origin of replication, a multicloning site and a selectable marker. The vector itself is generally a nucleotide sequence, commonly a DNA sequence that comprises an insert (transgene) and a larger sequence that serves as the “backbone” of the vector. Modern vectors may encompass additional features besides the transgene insert and a backbone: promoter, genetic marker, antibiotic resistance, reporter gene, targeting sequence, protein purification tag. Vectors called expression vectors (expression constructs) specifically are for the expression of the transgene in the target cell, and generally have control sequences.

[0392] The term “control sequences” refers to DNA sequences necessary for the expression of an operably linked coding sequence in a particular host organism. The control sequences that are suitable for prokaryotes, for example, include a promoter, optionally an operator sequence, and a ribosome binding side. Eukaryotic cells are known to utilize promoters, polyadenylation signals, and enhancers.

[0393] A nucleic acid is “operably linked” when it is placed into a functional relationship with another nucleic acid sequence. For example, DNA for a presequence or secretory leader is operably linked to DNA for a polypeptide if it is expressed as a preprotein that participates in the secretion of the polypeptide; a promoter or enhancer is operably linked to a coding sequence if it affects the transcription of the sequence; or a ribosome binding side is operably linked to a coding sequence if it is positioned so as to facilitate translation. Generally, “operably linked” means that the DNA sequences being linked are contiguous, and, in the case of a secretory leader, contiguous and in reading phase. However, enhancers do not have to be contiguous. Linking is accomplished by ligation at convenient restriction sites. If such sites do not exist, the synthetic oligonucleotide adaptors or linkers are used in accordance with conventional practice.

[0394] “Transfection” is the process of deliberately introducing nucleic acid molecules or polynucleotides (including vectors) into target cells. The term is mostly used for non-viral methods in eukaryotic cells. Transduction is often used to describe virus-mediated transfer of nucleic acid molecules or polynucleotides. Transfection of animal cells typically involves opening transient pores or “holes” in the cell membrane, to allow the uptake of material. Transfection can be carried out using calcium phosphate, by electroporation, by cell squeezing or by mixing a cationic lipid with the material to produce liposomes, which fuse with the cell membrane and deposit their cargo inside.

[0395] The term “transformation” is used to describe non-viral transfer of nucleic acid molecules or polynucleotides (including vectors) into bacteria, and also into non-animal eukaryotic cells, including plant cells. Transformation is hence the genetic alteration of a bacterial or non-animal eukaryotic cell resulting from the direct uptake through the cell membrane(s) from its surroundings and subsequent incorporation of exogenous genetic material (nucleic acid molecules). Transformation can be effected by artificial means. For transformation to happen, cells or bacteria must be in a state of competence, which may occur as a time-limited response to environmental conditions such as starvation and cell density.

[0396] Moreover, the invention provides a host cell transformed or transfected with the polynucleotide/nucleic acid molecule or with the vector of the invention. As used herein, the terms “host cell” or “recipient cell” are intended to include any individual cell or cell culture that can be or has/have been recipients of vectors, exogenous nucleic acid molecules, and polynucleotides encoding the antigen-binding molecule of the present invention; and/or recipients of the antigen-binding molecule itself. The introduction of the respective material into the cell is carried out by way of transformation, transfection and the like. The term “host cell” is also intended to include progeny or potential progeny of a single cell. Because certain modifications may occur in succeeding generations due to either natural, accidental, or deliberate mutation or due to environmental influences, such progeny may not, in fact, be completely identical (in morphology or in genomic or total DNA complement) to the parent cell, but is still included within the scope of the term as used herein. Suitable host cells include prokaryotic or eukaryotic cells, and also include but are not limited to bacteria, yeast cells, fungi cells, plant cells, and animal cells such as insect cells and mammalian cells, e.g., murine, rat, macaque or human.

[0397] The antigen-binding molecule of the invention can be produced in bacteria. After expression, the antigen-binding molecule of the invention is isolated from the E. coli cell paste in a soluble fraction and can be purified through, e.g., affinity chromatography and/or size exclusion. Final purification can be carried out similar to the process for purifying antibody expressed e.g., in CHO cells.

[0398] In addition to prokaryotes, eukaryotic microbes such as filamentous fungi or yeast are suitable cloning or expression hosts for the antigen-binding molecule of the invention. Saccharomyces cerevisiae, or common baker's yeast, is the most commonly used among lower eukaryotic host microorganisms. However, a number of other genera, species, and strains are commonly available and useful herein, such as Schizosaccharomyces pombe, Kluyveromyces hosts such as K. lactis, K. fragilis (ATCC 12424), K. bulgaricus (ATCC 16045), K. wickeramii (ATCC 24178), K. waltii (ATCC 56500), K. drosophilarum (ATCC 36906), K. thermotolerans, and K. marxianus; yarrowia (EP 402 226); Pichia pastoris (EP 183 070); Candida; Trichoderma reesia (EP 244 234); Neurospora crassa; Schwanniomyces such as Schwanniomyces occidentalis; and filamentous fungi such as Neurospora, Penicillium, Tolypocladium, and Aspergillus hosts such as A. nidulans and A. niger.

[0399] Suitable host cells for the expression of glycosylated antigen-binding molecule of the invention are derived from multicellular organisms. Examples of invertebrate cells include plant and insect cells. Numerous baculoviral strains and variants and corresponding permissive insect host cells from hosts such as Spodoptera frugiperda (caterpillar), Aedes aegypti (mosquito), Aedes albopictus (mosquito), Drosophila melanogaster (fruit fly), and Bombyx mori have been identified. A variety of viral strains for transfection are publicly available, e.g., the L-1 variant of Autographa californica NPV and the Bm-5 strain of Bombyx mori NPV, and such viruses may be used as the virus herein according to the present invention, particularly for transfection of Spodoptera frugiperda cells.

[0400] Plant cell cultures of cotton, corn, potato, soybean, petunia, tomato, Arabidopsis and tobacco can also be used as hosts. Cloning and expression vectors useful in the production of proteins in plant cell culture are known to those of skill in the art. See e.g. Hiatt et al., Nature (1989) 342: 76-78, Owen et al. (1992) Bio/Technology 10: 790-794, Artsaenko et al. (1995) The Plant J 8: 745-750, and Fecker et al. (1996) Plant Mol Biol 32: 979-986.

[0401] However, interest has been greatest in vertebrate cells, and propagation of vertebrate cells in culture (tissue culture) has become a routine procedure. Examples of useful mammalian host cell lines are monkey kidney CV1 line transformed by SV40 (COS-7, ATCC CRL 1651); human embryonic kidney line (293 or 293 cells subcloned for growth in suspension culture, Graham et al., J. Gen Virol. 36: 59 (1977)); baby hamster kidney cells (BHK, ATCC CCL 10); Chinese hamster ovary cells/-DHFR (CHO, Urlaub et al., Proc. Natd. Acad. Sci. USA 77: 4216 (1980)); mouse sertoli cells (TM4, Mather, Biol. Reprod. 23: 243-251 (1980)); monkey kidney cells (CVI ATCC CCL 70); African green monkey kidney cells (VERO-76, ATCC CRL1587); human cervical carcinoma cells (HELA, ATCC CCL 2); canine kidney cells (MDCK, ATCC CCL 34); buffalo rat liver cells (BRL 3 Å, ATCC CRL 1442); human lung cells (W138, ATCC CCL 75); human liver cells (Hep G2,1413 8065); mouse mammary tumor (MMT 060562, ATCC CCL5 1); TRI cells (Mather et al., Annals N. Y Acad. Sci. (1982) 383: 44-68); MRC 5 cells; FS4 cells; and a human hepatoma line (Hep G2).

[0402] In a further embodiment the invention provides a process for the production of an antigen-binding molecule of the invention, said process comprising culturing a host cell of the invention under conditions allowing the expression of the antigen-binding molecule of the invention and recovering the produced antigen-binding molecule from the culture.

[0403] As used herein, the term “culturing” refers to the in vitro maintenance, differentiation, growth, proliferation and/or propagation of cells under suitable conditions in a medium. The term “expression” includes any step involved in the production of an antigen-binding molecule of the invention including, but not limited to, transcription, post-transcriptional modification, translation, post-translational modification, and secretion.

[0404] When using recombinant techniques, the antigen-binding molecule can be produced intracellularly, in the periplasmic space, or directly secreted into the medium. If the antigen-binding molecule is produced intracellularly, as a first step, the particulate debris, either host cells or lysed fragments, are removed, for example, by centrifugation or ultrafiltration. Carter et al., Bio/Technology 10: 163-167 (1992) describe a procedure for isolating antibodies which are secreted to the periplasmic space of E. coli. Briefly, cell paste is thawed in the presence of sodium acetate (pH 3.5), EDTA, and phenylmethylsulfonylfluoride (PMSF) over about 30 min. Cell debris can be removed by centrifugation. Where the antibody is secreted into the medium, supernatants from such expression systems are generally first concentrated using a commercially available protein concentration filter, for example, an Amicon or Millipore Pellicon ultrafiltration unit. A protease inhibitor such as PMSF may be included in any of the foregoing steps to inhibit proteolysis and antibiotics may be included to prevent the growth of adventitious contaminants.

[0405] The antigen-binding molecule of the invention prepared from the host cells can be recovered or purified using, for example, hydroxylapatite chromatography, gel electrophoresis, dialysis, and affinity chromatography. Other techniques for protein purification such as fractionation on an ion-exchange column, ethanol precipitation, Reverse Phase HPLC, chromatography on silica, chromatography on heparin SEPHAROSE™, chromatography on an anion or cation exchange resin (such as a polyaspartic acid column), chromato-focusing, SDS-PAGE, and ammonium sulfate precipitation are also available depending on the antibody to be recovered. Where the antigen-binding molecule of the invention comprises a CH3 domain, the Bakerbond ABX resin (J. T. Baker, Phillipsburg, NJ) is useful for purification.

[0406] Affinity chromatography is a preferred purification technique. The matrix to which the affinity ligand is attached is most often agarose, but other matrices are available. Mechanically stable matrices such as controlled pore glass or poly (styrenedivinyl) benzene allow for faster flow rates and shorter processing times than can be achieved with agarose.

[0407] Moreover, the invention provides a pharmaceutical composition comprising an antigen-binding molecule of the invention or an antigen-binding molecule produced according to the process of the invention. It is preferred for the pharmaceutical composition of the invention that the homogeneity of the antigen-binding molecule is 80%, more preferably 81%, 82%, 83%, 84%, or 85%, further preferably 86%, 87%, 88%, 89%, or 90%, still further preferably, 91%, 92%, 93%, 94%, or 95% and most preferably 96%, 97%, 98% or 99%.

[0408] As used herein, the term “pharmaceutical composition” relates to a composition which is suitable for administration to a patient, preferably a human patient. The particularly preferred pharmaceutical composition of this invention comprises one or a plurality of the antigen-binding molecule(s) of the invention, preferably in a therapeutically effective amount. Preferably, the pharmaceutical composition further comprises suitable formulations of one or more (pharmaceutically effective) carriers, stabilizers, excipients, diluents, solubilizers, surfactants, emulsifiers, preservatives and/or adjuvants. Acceptable constituents of the composition are preferably nontoxic to recipients at the dosages and concentrations employed. Pharmaceutical compositions of the invention include, but are not limited to, liquid, frozen, and lyophilized compositions.

[0409] The inventive compositions may comprise a pharmaceutically acceptable carrier. In general, as used herein, “pharmaceutically acceptable carrier” means any and all aqueous and non-aqueous solutions, sterile solutions, solvents, buffers, e.g. phosphate buffered saline (PBS) solutions, water, suspensions, emulsions, such as oil/water emulsions, various types of wetting agents, liposomes, dispersion media and coatings, which are compatible with pharmaceutical administration, in particular with parenteral administration. The use of such media and agents in pharmaceutical compositions is well known in the art, and the compositions comprising such carriers can be formulated by well-known conventional methods.

[0410] Certain embodiments provide pharmaceutical compositions comprising the antigen-binding molecule of the invention and further one or more excipients such as those illustratively described in this section and elsewhere herein. Excipients can be used in the invention in this regard for a wide variety of purposes, such as adjusting physical, chemical, or biological properties of formulations, such as adjustment of viscosity, and or processes of the invention to improve effectiveness and or to stabilize such formulations and processes against degradation and spoilage due to, for instance, stresses that occur during manufacturing, shipping, storage, pre-use preparation, administration, and thereafter.

[0411] In certain embodiments, the pharmaceutical composition may contain formulation materials for the purpose of modifying, maintaining or preserving, e.g., the pH, osmolarity, viscosity, clarity, color, isotonicity, odor, sterility, stability, rate of dissolution or release, adsorption or penetration of the composition (see, REMINGTON'S PHARMACEUTICAL SCIENCES, 18” Edition, (A.R. Genrmo, ed.), 1990, Mack Publishing Company). In such embodiments, suitable formulation materials may include, but are not limited to:
[0412] amino acids such as glycine, alanine, glutamine, asparagine, threonine, proline, 2-phenylalanine, including charged amino acids, preferably lysine, lysine acetate, arginine, glutamate and/or histidine
[0413] antimicrobials such as antibacterial and antifungal agents
[0414] antioxidants such as ascorbic acid, methionine, sodium sulfite or sodium hydrogen-sulfite;
[0415] buffers, buffer systems and buffering agents which are used to maintain the composition at physiological pH or at a slightly lower pH, preferably a lower pH of 4.0 to 6.5; examples of buffers are borate, bicarbonate, Tris-HCl, citrates, phosphates or other organic acids, succinate, phosphate, and histidine; for example Tris buffer of about pH 7.0-8.5;
[0416] non-aqueous solvents such as propylene glycol, polyethylene glycol, vegetable oils such as olive oil, and injectable organic esters such as ethyl oleate;
[0417] aqueous carriers including water, alcoholic/aqueous solutions, emulsions or suspensions, including saline and buffered media;
[0418] biodegradable polymers such as polyesters;
[0419] bulking agents such as mannitol or glycine;
[0420] chelating agents such as ethylenediamine tetraacetic acid (EDTA);
[0421] isotonic and absorption delaying agents;
[0422] complexing agents such as caffeine, polyvinylpyrrolidone, beta-cyclodextrin or hydroxypropyl-beta-cyclodextrin)
[0423] fillers;
[0424] monosaccharides; disaccharides; and other carbohydrates (such as glucose, mannose or dextrins); carbohydrates may be non-reducing sugars, preferably trehalose, sucrose, octasulfate, sorbitol or xylitol;
[0425] (low molecular weight) proteins, polypeptides or proteinaceous carriers such as human or bovine serum albumin, gelatin or immunoglobulins, preferably of human origin;
[0426] coloring and flavouring agents;
[0427] sulfur containing reducing agents, such as glutathione, thioctic acid, sodium thioglycolate, thioglycerol, [alpha]-monothioglycerol, and sodium thio sulfate
[0428] diluting agents;
[0429] emulsifying agents;
[0430] hydrophilic polymers such as polyvinylpyrrolidone)
[0431] salt-forming counter-ions such as sodium;
[0432] preservatives such as antimicrobials, anti-oxidants, chelating agents, inert gases and the like; examples are: benzalkonium chloride, benzoic acid, salicylic acid, thimerosal, phenethyl alcohol, methylparaben, propylparaben, chlorhexidine, sorbic acid or hydrogen peroxide);
[0433] metal complexes such as Zn-protein complexes;
[0434] solvents and co-solvents (such as glycerin, propylene glycol or polyethylene glycol);
[0435] sugars and sugar alcohols, such as trehalose, sucrose, octasulfate, mannitol, sorbitol or xylitol stachyose, mannose, sorbose, xylose, ribose, myoinisitose, galactose, lactitol, ribitol, myoinisitol, galactitol, glycerol, cyclitols (e.g., inositol), polyethylene glycol; and polyhydric sugar alcohols;
[0436] suspending agents;
[0437] surfactants or wetting agents such as pluronics, PEG, sorbitan esters, polysorbates such as polysorbate 20, polysorbate, triton, tromethamine, lecithin, cholesterol, tyloxapal; surfactants may be detergents, preferably with a molecular weight of ≥1.2 KID and/or a polyether, preferably with a molecular weight of ≥3 KD; non-limiting examples for preferred detergents are Tween 20, Tween 40, Tween 60, Tween 80 and Tween 85; non-limiting examples for preferred polyethers are PEG 3000, PEG 3350, PEG 4000 and PEG 5000;
[0438] stability enhancing agents such as sucrose or sorbitol;
[0439] tonicity enhancing agents such as alkali metal halides, preferably sodium or potassium chloride, mannitol sorbitol;
[0440] parenteral delivery vehicles including sodium chloride solution, Ringer's dextrose, dextrose and sodium chloride, lactated Ringer's, or fixed oils;
[0441] intravenous delivery vehicles including fluid and nutrient replenishers, electrolyte replenishers (such as those based on Ringer's dextrose).

[0442] In the context of the present invention, a pharmaceutical composition, which is preferably a liquid composition or may be a solid composition obtained by lyophilisation or may be a reconstituted liquid composition comprises
[0443] (a) an antigen-binding molecule comprising at least four binding domains, wherein:
[0444] a first and a third domain binds to a target cell surface antigen and has an isoelectric point (pI) in the range of 4 to 9,5;
[0445] a second and a fourth domain binds to CD3; and has a pI in the range of 8 to 10, preferably 8.5 to 9.0; and
[0446] a spacer comprising preferably two polypeptide monomers, each comprising a hinge, a CH2 domain and a CH3 domain, wherein said two polypeptide monomers are fused to each other via a peptide linker;
[0447] (b) at least one buffer agent;
[0448] (c) at least one saccharide; and
[0449] (d) at least one surfactant;
[0450] and wherein the pH of the pharmaceutical composition is in the range of 3.5 to 6.

[0451] It is further envisaged in the context of the present invention that the at least one buffer agent is present at a concentration range of 5 to 200 mM, more preferably at a concentration range of 10 to 50 mM. It is envisaged in the context of the present invention that the at least one saccharide is selected from the group consisting of monosaccharide, disaccharide, cyclic polysaccharide, sugar alcohol, linear branched dextran or linear non-branched dextran. It is also envisaged in the context of the present invention that the disaccharide is selected from the group consisting of sucrose, trehalose and mannitol, sorbitol, and combinations thereof. It is further envisaged in the context of the present invention that the sugar alcohol is sorbitol. It is envisaged in the context of the present invention that the at least one saccharide is present at a concentration in the range of 1 to 15% (m/V), preferably in a concentration range of 9 to 12% (m/V).

[0452] It is also envisaged in the context of the present invention that the at least one surfactant is selected from the group consisting of polysorbate 20, polysorbate 40, polysorbate 60, polysorbate 80, poloxamer 188, pluronic F68, triton X-100, polyoxyethylen, PEG 3350, PEG 4000 and combinations thereof. It is further envisaged in the context of the present invention that the at least one surfactant is present at a concentration in the range of 0.004 to 0.5% (m/V), preferably in the range of 0.001 to 0.01% (m/V). It is envisaged in the context of the present invention that the pH of the composition is in the range of 4.0 to 5.0, preferably 4.2. It is also envisaged in the context of the present invention that the pharmaceutical composition has an osmolarity in the range of 150 to 500 mOsm. It is further envisaged in the context of the present invention that the pharmaceutical composition further comprises an excipient selected from the group consisting of, one or more polyol and one or more amino acid. It is envisaged in the context of the present invention that said one or more excipient is present in the concentration range of 0.1 to 15% (w/V).

[0453] It is also envisaged in the context of the present invention that the pharmaceutical composition comprises
[0454] (a) the antigen-binding molecule as discussed above,
[0455] (b) 10 mM glutamate or acetate,
[0456] (c) 9% (m/V) sucrose or 6% (m/V) sucrose and 6% (m/V) hydroxypropyl-β-cyclodextrin,
[0457] (d) 0.01% (m/V) polysorbate 80
[0458] and wherein the pH of the liquid pharmaceutical composition is 4.2.

[0459] It is further envisaged in the context of the present invention that the antigen-binding molecule is present in a concentration range of 0.1 to 8 mg/ml, preferably of 0.2-2.5 mg/ml, more preferably of 0.25-1.0 mg/ml.

[0460] It is evident to those skilled in the art that the different constituents of the pharmaceutical composition (e.g., those listed above) can have different effects, for example, and amino acid can act as a buffer, a stabilizer and/or an antioxidant; mannitol can act as a bulking agent and/or a tonicity enhancing agent; sodium chloride can act as delivery vehicle and/or tonicity enhancing agent; etc.

[0461] It is envisaged that the composition of the invention may comprise, in addition to the polypeptide of the invention defined herein, further biologically active agents, depending on the intended use of the composition. Such agents may be drugs acting on the gastro-intestinal system, drugs acting as cytostatica, drugs preventing hyperurikemia, drugs inhibiting immunoreactions (e.g. corticosteroids), drugs modulating the inflammatory response, drugs acting on the circulatory system and/or agents such as cytokines known in the art. It is also envisaged that the antigen-binding molecule of the present invention is applied in a co-therapy, i.e., in combination with another anti-cancer medicament.

[0462] In certain embodiments, optimal pharmaceutical compositions may influence the physical state, stability, rate of in vivo release and rate of in vivo clearance of the antigen-binding molecule of the invention. In certain embodiments, the primary vehicle or carrier in a pharmaceutical composition may be either aqueous or non-aqueous in nature. For example, a suitable vehicle or carrier may be water for injection, physiological saline solution or artificial cerebrospinal fluid, possibly supplemented with other materials common in compositions for parenteral administration. Neutral buffered saline or saline mixed with serum albumin are further exemplary vehicles. In certain embodiments, the antigen-binding molecule of the invention compositions may be prepared for storage by mixing the selected composition having the desired degree of purity with optional formulation agents (REMINGTON'S PHARMACEUTICAL SCIENCES, supra) in the form of a lyophilized cake or an aqueous solution. Further, in certain embodiments, the antigen-binding molecule of the invention may be formulated as a lyophilizate using appropriate excipients such as sucrose.

[0463] When parenteral administration is contemplated, the therapeutic compositions for use in this invention may be provided in the form of a pyrogen-free, parenterally acceptable aqueous solution comprising the desired antigen-binding molecule of the invention in a pharmaceutically acceptable vehicle. A particularly suitable vehicle for parenteral injection is sterile distilled water in which the antigen-binding molecule of the invention is formulated as a sterile, isotonic solution, properly preserved. In certain embodiments, the preparation can involve the formulation of the desired molecule with an agent, such as injectable microspheres, bio-erodible particles, polymeric compounds (such as polylactic acid or polyglycolic acid), beads or liposomes, that may provide controlled or sustained release of the product which can be delivered via depot injection. In certain embodiments, hyaluronic acid may also be used, having the effect of promoting sustained duration in the circulation. In certain embodiments, implantable drug delivery devices may be used to introduce the desired antigen-binding molecule.

[0464] Additional pharmaceutical compositions will be evident to those skilled in the art, including formulations involving the antigen-binding molecule of the invention in sustained- or controlled-delivery/release formulations. Techniques for formulating a variety of other sustained- or controlled-delivery means, such as liposome carriers, bio-erodible microparticles or porous beads and depot injections, are also known to those skilled in the art. See, for example, International Patent Application No. PCT/US93/00829, which describes controlled release of porous polymeric microparticles for delivery of pharmaceutical compositions. Sustained-release preparations may include semipermeable polymer matrices in the form of shaped articles, e.g., films, or microcapsules. Sustained release matrices may include polyesters, hydrogels, polylactides (as disclosed in U.S. Pat. No. 3,773,919 and European Patent Application Publication No. EP 058481), copolymers of L-glutamic acid and gamma ethyl-L-glutamate (Sidman et al., 1983, Biopolymers 2:547-556), poly (2-hydroxyethyl-methacrylate) (Langer et al., 1981, J. Biomed. Mater. Res. 15:167-277 and Langer, 1982, Chem. Tech. 12:98-105), ethylene vinyl acetate (Langer et al., 1981, supra) or poly-D(-)-3-hydroxybutyric acid (European Patent Application Publication No. EP 133,988). Sustained release compositions may also include liposomes that can be prepared by any of several methods known in the art. See, e.g., Eppstein et al., 1985, Proc. Natl. Acad. Sci. U.S.A. 82:3688-3692; European Patent Application Publication Nos. EP 036,676; EP 088,046 and EP 143,949.

[0465] The antigen-binding molecule may also be entrapped in microcapsules prepared, for example, by coacervation techniques or by interfacial polymerization (for example, hydroxymethylcellulose or gelatine-microcapsules and poly(methylmethacylate) microcapsules, respectively), in colloidal drug delivery systems (for example, liposomes, albumin microspheres, microemulsions, nanoparticles and nanocapsules), or in macroemulsions. Such techniques are disclosed in Remington's Pharmaceutical Sciences, 16th edition, Oslo, A., Ed., (1980).

[0466] Pharmaceutical compositions used for in vivo administration are typically provided as sterile preparations. Sterilization can be accomplished by filtration through sterile filtration membranes. When the composition is lyophilized, sterilization using this method may be conducted either prior to or following lyophilization and reconstitution. Compositions for parenteral administration can be stored in lyophilized form or in a solution. Parenteral compositions generally are placed into a container having a sterile access port, for example, an intravenous solution bag or vial having a stopper pierceable by a hypodermic injection needle.

[0467] Another aspect of the invention includes self-buffering antigen-binding molecule of the invention formulations, which can be used as pharmaceutical compositions, as described in international patent application WO 06138181A2 (PCT/US2006/022599). A variety of expositions are available on protein stabilization and formulation materials and methods useful in this regard, such as Arakawa et al., “Solvent interactions in pharmaceutical formulations,” Pharm Res. 8(3): 285-91 (1991); Kendrick et al., “Physical stabilization of proteins in aqueous solution” in: RATIONAL DESIGN OF STABLE PROTEIN FORMULATIONS: THEORY AND PRACTICE, Carpenter and Manning, eds. Pharmaceutical Biotechnology. 13: 61-84 (2002), and Randolph et al., “Surfactant-protein interactions”, Pharm Biotechnol. 13: 159-75 (2002), see particularly the parts pertinent to excipients and processes of the same for self-buffering protein formulations in accordance with the current invention, especially as to protein pharmaceutical products and processes for veterinary and/or human medical uses.

[0468] Salts may be used in accordance with certain embodiments of the invention to, for example, adjust the ionic strength and/or the isotonicity of a formulation and/or to improve the solubility and/or physical stability of a protein or other ingredient of a composition in accordance with the invention. As is well known, ions can stabilize the native state of proteins by binding to charged residues on the protein's surface and by shielding charged and polar groups in the protein and reducing the strength of their electrostatic interactions, attractive, and repulsive interactions. Ions also can stabilize the denatured state of a protein by binding to, in particular, the denatured peptide linkages (—CONH) of the protein. Furthermore, ionic interaction with charged and polar groups in a protein also can reduce intermolecular electrostatic interactions and, thereby, prevent or reduce protein aggregation and insolubility.

[0469] Ionic species differ significantly in their effects on proteins. A number of categorical rankings of ions and their effects on proteins have been developed that can be used in formulating pharmaceutical compositions in accordance with the invention. One example is the Hofmeister series, which ranks ionic and polar non-ionic solutes by their effect on the conformational stability of proteins in solution. Stabilizing solutes are referred to as “kosmotropic”. Destabilizing solutes are referred to as “chaotropic”. Kosmotropes commonly are used at high concentrations (e.g., ≥1 molar ammonium sulfate) to precipitate proteins from solution (“salting-out”). Chaotropes commonly are used to denture and/or to solubilize proteins (“salting-in”). The relative effectiveness of ions to “salt-in” and “salt-out” defines their position in the Hofmeister series.

[0470] Free amino acids can be used in the antigen-binding molecule of the invention formulations in accordance with various embodiments of the invention as bulking agents, stabilizers, and antioxidants, as well as other standard uses. Lysine, proline, serine, and alanine can be used for stabilizing proteins in a formulation. Glycine is useful in lyophilization to ensure correct cake structure and properties. Arginine may be useful to inhibit protein aggregation, in both liquid and lyophilized formulations. Methionine is useful as an antioxidant.

[0471] Polyols include sugars, e.g., mannitol, sucrose, and sorbitol and polyhydric alcohols such as, for instance, glycerol and propylene glycol, and, for purposes of discussion herein, polyethylene glycol (PEG) and related substances. Polyols are kosmotropic. They are useful stabilizing agents in both liquid and lyophilized formulations to protect proteins from physical and chemical degradation processes. Polyols also are useful for adjusting the tonicity of formulations. Among polyols useful in select embodiments of the invention is mannitol, commonly used to ensure structural stability of the cake in lyophilized formulations. It ensures structural stability to the cake. It is generally used with a lyoprotectant, e.g., sucrose. Sorbitol and sucrose are among preferred agents for adjusting tonicity and as stabilizers to protect against freeze-thaw stresses during transport or the preparation of bulks during the manufacturing process. Reducing sugars (which contain free aldehyde or ketone groups), such as glucose and lactose, can glycate surface lysine and arginine residues. Therefore, they generally are not among preferred polyols for use in accordance with the invention. In addition, sugars that form such reactive species, such as sucrose, which is hydrolyzed to fructose and glucose under acidic conditions, and consequently engenders glycation, also is not among preferred polyols of the invention in this regard. PEG is useful to stabilize proteins and as a cryoprotectant and can be used in the invention in this regard.

[0472] Embodiments of the antigen-binding molecule of the invention formulations further comprise surfactants. Protein molecules may be susceptible to adsorption on surfaces and to denaturation and consequent aggregation at air-liquid, solid-liquid, and liquid-liquid interfaces. These effects generally scale inversely with protein concentration. These deleterious interactions generally scale inversely with protein concentration and typically are exacerbated by physical agitation, such as that generated during the shipping and handling of a product. Surfactants routinely are used to prevent, minimize, or reduce surface adsorption. Useful surfactants in the invention in this regard include polysorbate 20, polysorbate 80, other fatty acid esters of sorbitan polyethoxylates, and poloxamer 188. Surfactants also are commonly used to control protein conformational stability. The use of surfactants in this regard is protein-specific since, any given surfactant typically will stabilize some proteins and destabilize others.

[0473] Polysorbates are susceptible to oxidative degradation and often, as supplied, contain sufficient quantities of peroxides to cause oxidation of protein residue side-chains, especially methionine. Consequently, polysorbates should be used carefully, and when used, should be employed at their lowest effective concentration. In this regard, polysorbates exemplify the general rule that excipients should be used in their lowest effective concentrations.

[0474] Embodiments of the antigen-binding molecule of the invention formulations further comprise one or more antioxidants. To some extent deleterious oxidation of proteins can be prevented in pharmaceutical formulations by maintaining proper levels of ambient oxygen and temperature and by avoiding exposure to light. Antioxidant excipients can be used as well to prevent oxidative degradation of proteins. Among useful antioxidants in this regard are reducing agents, oxygen/free-radical scavengers, and chelating agents. Antioxidants for use in therapeutic protein formulations in accordance with the invention preferably are water-soluble and maintain their activity throughout the shelf life of a product. EDTA is a preferred antioxidant in accordance with the invention in this regard. Antioxidants can damage proteins. For instance, reducing agents, such as glutathione in particular, can disrupt intramolecular disulfide linkages. Thus, antioxidants for use in the invention are selected to, among other things, eliminate or sufficiently reduce the possibility of themselves damaging proteins in the formulation.

[0475] Formulations in accordance with the invention may include metal ions that are protein co-factors and that are necessary to form protein coordination complexes, such as zinc necessary to form certain insulin suspensions. Metal ions also can inhibit some processes that degrade proteins. However, metal ions also catalyze physical and chemical processes that degrade proteins. Magnesium ions (10-120 mM) can be used to inhibit isomerization of aspartic acid to isoaspartic acid. Ca⁺² ions (up to 100 mM) can increase the stability of human deoxyribonuclease. Mg⁺², Mn⁺², and Zn⁺², however, can destabilize rhDNase. Similarly, Ca⁺² and Sr⁺² can stabilize Factor VIII, it can be destabilized by Mg⁺², Mn⁺² and Zn⁺², Cu⁺² and Fe⁺², and its aggregation can be increased by Al⁺³ ions.

[0476] Embodiments of the antigen-binding molecule of the invention formulations further comprise one or more preservatives. Preservatives are necessary when developing multi-dose parenteral formulations that involve more than one extraction from the same container. Their primary function is to inhibit microbial growth and ensure product sterility throughout the shelf-life or term of use of the drug product. Commonly used preservatives include benzyl alcohol, phenol and m-cresol. Although preservatives have a long history of use with small-molecule parenterals, the development of protein formulations that includes preservatives can be challenging. Preservatives almost always have a destabilizing effect (aggregation) on proteins, and this has become a major factor in limiting their use in multi-dose protein formulations. To date, most protein drugs have been formulated for single-use only. However, when multi-dose formulations are possible, they have the added advantage of enabling patient convenience, and increased marketability. A good example is that of human growth hormone (hGH) where the development of preserved formulations has led to commercialization of more convenient, multi-use injection pen presentations. At least four such pen devices containing preserved formulations of hGH are currently available on the market. Norditropin (liquid, Novo Nordisk), Nutropin AQ (liquid, Genentech) & Genotropin (lyophilized—dual chamber cartridge, Pharmacia & Upjohn) contain phenol while Somatrope (Eli Lilly) is formulated with m-cresol. Several aspects need to be considered during the formulation and development of preserved dosage forms. The effective preservative concentration in the drug product must be optimized. This requires testing a given preservative in the dosage form with concentration ranges that confer anti-microbial effectiveness without compromising protein stability.

[0477] As may be expected, development of liquid formulations containing preservatives are more challenging than lyophilized formulations. Freeze-dried products can be lyophilized without the preservative and reconstituted with a preservative containing diluent at the time of use. This shortens the time for which a preservative is in contact with the protein, significantly minimizing the associated stability risks. With liquid formulations, preservative effectiveness and stability should be maintained over the entire product shelf-life (about 18 to 24 months). An important point to note is that preservative effectiveness should be demonstrated in the final formulation containing the active drug and all excipient components.

[0478] The antigen-binding molecules disclosed herein may also be formulated as immuno-liposomes. A “liposome” is a small vesicle composed of various types of lipids, phospholipids and/or surfactant which is useful for delivery of a drug to a mammal. The components of the liposome are commonly arranged in a bilayer formation, similar to the lipid arrangement of biological membranes. Liposomes containing the antigen-binding molecule are prepared by methods known in the art, such as described in Epstein et al., Proc. Natl. Acad. Sci. USA, 82: 3688 (1985); Hwang et al., Proc. Natl Acad. Sci. USA, 77: 4030 (1980); U.S. Pat. Nos. 4,485,045 and 4,544,545; and WO 97/38731. Liposomes with enhanced circulation time are disclosed in U.S. Pat. No. 5,013,556. Particularly useful liposomes can be generated by the reverse phase evaporation method with a lipid composition comprising phosphatidylcholine, cholesterol and PEG-derivatized phosphatidylethanolamine (PEG-PE). Liposomes are extruded through filters of defined pore size to yield liposomes with the desired diameter. Fab′ fragments of the antigen-binding molecule of the present invention can be conjugated to the liposomes as described in Martin et al. J. Biol. Chem. 257: 286-288 (1982) via a disulfide interchange reaction. A chemotherapeutic agent is optionally contained within the liposome. See Gabizon et al. J. National Cancer Inst. 81 (19) 1484 (1989).

[0479] Once the pharmaceutical composition has been formulated, it may be stored in sterile vials as a solution, suspension, gel, emulsion, solid, crystal, or as a dehydrated or lyophilized powder. Such formulations may be stored either in a ready-to-use form or in a form (e.g., lyophilized) that is reconstituted prior to administration.

[0480] The biological activity of the pharmaceutical composition defined herein can be determined for instance by cytotoxicity assays, as described in the following examples, in WO 99/54440 or by Schlereth et al. (Cancer Immunol. Immunother. 20 (2005), 1-12). “Efficacy” or “in vivo efficacy” as used herein refers to the response to therapy by the pharmaceutical composition of the invention, using e.g. standardized NCI response criteria. The success or in vivo efficacy of the therapy using a pharmaceutical composition of the invention refers to the effectiveness of the composition for its intended purpose, i.e. the ability of the composition to cause its desired effect, i.e. depletion of pathologic cells, e.g. tumor cells. The in vivo efficacy may be monitored by established standard methods for the respective disease entities including, but not limited to white blood cell counts, differentials, Fluorescence Activated Cell Sorting, bone marrow aspiration. In addition, various disease specific clinical chemistry parameters and other established standard methods may be used. Furthermore, computer-aided tomography, X-ray, nuclear magnetic resonance tomography (e.g. for National Cancer Institute-criteria based response assessment [Cheson B D, Horning S J, Coiffier B, Shipp M A, Fisher R I, Connors J M, Lister T A, Vose J, Grillo-Lopez A, Hagenbeek A, Cabanillas F, Klippensten D, Hiddemann W, Castellino R, Harris N L, Armitage J O, Carter W, Hoppe R, Canellos G P. Report of an international workshop to standardize response criteria for non-Hodgkin's lymphomas. NCI Sponsored International Working Group. J Clin Oncol. 1999 April;17(4):1244]), positron-emission tomography scanning, white blood cell counts, differentials, Fluorescence Activated Cell Sorting, bone marrow aspiration, lymph node biopsies/histologies, and various lymphoma specific clinical chemistry parameters (e.g. lactate dehydrogenase) and other established standard methods may be used.

[0481] Another major challenge in the development of drugs such as the pharmaceutical composition of the invention is the predictable modulation of pharmacokinetic properties. To this end, a pharmacokinetic profile of the drug candidate, i.e. a profile of the pharmacokinetic parameters that affect the ability of a particular drug to treat a given condition, can be established. Pharmacokinetic parameters of the drug influencing the ability of a drug for treating a certain disease entity include, but are not limited to: half-life, volume of distribution, hepatic first-pass metabolism and the degree of blood serum binding. The efficacy of a given drug agent can be influenced by each of the parameters mentioned above. It is an envisaged characteristic of the antigen-binding molecules of the present invention provided with the specific FC modality that they comprise, for example, differences in pharmacokinetic behavior. A half-life extended targeting antigen-binding molecule according to the present invention preferably shows a surprisingly increased residence time in vivo in comparison to “canonical” non-HLE versions of said antigen-binding molecule.

[0482] “Half-life” means the time where 50% of an administered drug are eliminated through biological processes, e.g. metabolism, excretion, etc. By “hepatic first-pass metabolism” is meant the propensity of a drug to be metabolized upon first contact with the liver, i.e. during its first pass through the liver. “Volume of distribution” means the degree of retention of a drug throughout the various compartments of the body, like e.g. intracellular and extracellular spaces, tissues and organs, etc. and the distribution of the drug within these compartments. “Degree of blood serum binding” means the propensity of a drug to interact with and bind to blood serum proteins, such as albumin, leading to a reduction or loss of biological activity of the drug.

[0483] Pharmacokinetic parameters also include bioavailability, lag time (Tlag), Tmax, absorption rates, more onset and/or Cmax for a given amount of drug administered. “Bioavailability” means the amount of a drug in the blood compartment. “Lag time” means the time delay between the administration of the drug and its detection and measurability in blood or plasma. “Tmax” is the time after which maximal blood concentration of the drug is reached, and “Cmax” is the blood concentration maximally obtained with a given drug. The time to reach a blood or tissue concentration of the drug which is required for its biological effect is influenced by all parameters. Pharmacokinetic parameters of bispecific antigen-binding molecules exhibiting cross-species specificity, which may be determined in preclinical animal testing in non-chimpanzee primates as outlined above, are also set forth e.g. in the publication by Schlereth et al. (Cancer Immunol. Immunother. 20 (2005), 1-12).

[0484] In a preferred aspect of the invention the pharmaceutical composition is stable for at least four weeks at about −20° C. As apparent from the appended examples the quality of an antigen-binding molecule of the invention vs. the quality of corresponding state of the art antigen-binding molecules may be tested using different systems. Those tests are understood to be in line with the “ICH Harmonised Tripartite Guideline: Stability Testing of Biotechnological/Biological Products Q5C and Specifications: Test procedures and Acceptance Criteria for Biotech Biotechnological/Biological Products Q6B” and, thus are elected to provide a stability-indicating profile that provides certainty that changes in the identity, purity and potency of the product are detected. It is well accepted that the term purity is a relative term. Due to the effect of glycosylation, deamidation, or other heterogeneities, the absolute purity of a biotechnological/biological product should be typically assessed by more than one method and the purity value derived is method-dependent. For the purpose of stability testing, tests for purity should focus on methods for determination of degradation products.

[0485] For the assessment of the quality of a pharmaceutical composition comprising an antigen-binding molecule of the invention may be analyzed e.g. by analyzing the content of soluble aggregates in a solution (HMWS per size exclusion). It is preferred that stability for at least four weeks at about −20° C. is characterized by a content of less than 1.5% HMWS, preferably by less than 1% HMWS.

[0486] A preferred formulation for the antigen-binding molecule as a pharmaceutical composition may e.g. comprise the components of a formulation as described below:
[0487] Formulation: potassium phosphate, L-arginine hydrochloride, trehalose dihydrate, polysorbate 80 at pH 6.0

[0488] Other examples for the assessment of the stability of an antigen-binding molecule of the invention in form of a pharmaceutical composition are provided in the appended examples 4-12. In those examples embodiments of antigen-binding molecules of the invention are tested with respect to different stress conditions in different pharmaceutical formulations and the results compared with other half-life extending (HLE) formats of bispecific T cell engaging antigen-binding molecule known from the art. In general, it is envisaged that antigen-binding molecules provided with the specific FC modality according to the present invention are typically more stable over a broad range of stress conditions such as temperature and light stress, both compared to antigen-binding molecules provided with different HLE formats and without any HLE format (e.g. “canonical” antigen-binding molecules). Said temperature stability may relate both to decreased (below room temperature including freezing) and increased (above room temperature including temperatures up to or above body temperature) temperature. As the person skilled in the art will acknowledge, such improved stability with regard to stress, which is hardly avoidable in clinical practice, makes the antigen-binding molecule safer because less degradation products will occur in clinical practice. In consequence, said increased stability means increased safety.

[0489] One embodiment provides the antigen-binding molecule of the invention or the antigen-binding molecule produced according to the process of the invention for use in the prevention, treatment or amelioration of a cancer correlating with, CD20, CD22, FLT3, CLL1, CHD3, MSLN, or EpCAM expression or CD20, CD22, FLT3,, CLL1, CHD3, MSLN, or EpCAM overexpression, such as prostate cancer.

[0490] The formulations described herein are useful as pharmaceutical compositions in the treatment, amelioration and/or prevention of the pathological medical condition as described herein in a patient in need thereof. The term “treatment” refers to both therapeutic treatment and prophylactic or preventative measures. Treatment includes the application or administration of the formulation to the body, an isolated tissue, or cell from a patient who has a disease/disorder, a symptom of a disease/disorder, or a predisposition toward a disease/disorder, with the purpose to cure, heal, alleviate, relieve, alter, remedy, ameliorate, improve, or affect the disease, the symptom of the disease, or the predisposition toward the disease.

[0491] The term “amelioration” as used herein refers to any improvement of the disease state of a patient having a disease as specified herein below, by the administration of an antigen-binding molecule according to the invention to a subject in need thereof. Such an improvement may also be seen as a slowing or stopping of the progression of the patient's disease. The term “prevention” as used herein means the avoidance of the occurrence or re-occurrence of a patient having a tumor or cancer or a metastatic cancer as specified herein below, by the administration of an antigen-binding molecule according to the invention to a subject in need thereof.

[0492] The term “disease” refers to any condition that would benefit from treatment with the antigen-binding molecule or the pharmaceutic composition described herein. This includes chronic and acute disorders or diseases including those pathological conditions that predispose the mammal to the disease in question.

[0493] A “neoplasm” is an abnormal growth of tissue, usually but not always forming a mass. When also forming a mass, it is commonly referred to as a “tumor”. Neoplasms or tumors or can be benign, potentially malignant (pre-cancerous), or malignant. Malignant neoplasms are commonly called cancer. They usually invade and destroy the surrounding tissue and may form metastases, i.e., they spread to other parts, tissues or organs of the body. Hence, the term “metatstatic cancer” encompasses metastases to other tissues or organs than the one of the original tumor. Lymphomas and leukemias are lymphoid neoplasms. For the purposes of the present invention, they are also encompassed by the terms “tumor” or “cancer”.

[0494] The term “viral disease” describes diseases, which are the result of a viral infection of a subject.

[0495] The term “immunological disorder” as used herein describes in line with the common definition of this term immunological disorders such as autoimmune diseases, hypersensitivities, immune deficiencies.

[0496] In one embodiment the invention provides a method for the treatment or amelioration of a cancer correlating with CS1, BCMA, CD20, CD22, FLT3, CD123, CLL1, CHD3, MSLN, or EpCAM expression or CS1, BCMA, CD20, CD22, FLT3, CD123, CLL1, CHD3, MSLN, or EpCAM overexpression, comprising the step of administering to a subject in need thereof the antigen-binding molecule of the invention, or the antigen-binding molecule produced according to the process of the invention. The CS1, BCMA, CD20, CD22, FLT3, CD123, CLL1, CHD3, MSLN, or EpCAMxCD3 bispecific single chain antibody is particularly advantageous for the therapy of cancer, preferably solid tumors, more preferably carcinomas and prostate cancer.

[0497] The terms “subject in need” or those “in need of treatment” includes those already with the disorder, as well as those in which the disorder is to be prevented. The subject in need or “patient” includes human and other mammalian subjects that receive either prophylactic or therapeutic treatment.

[0498] The antigen-binding molecule of the invention will generally be designed for specific routes and methods of administration, for specific dosages and frequencies of administration, for specific treatments of specific diseases, with ranges of bio-availability and persistence, among other things. The materials of the composition are preferably formulated in concentrations that are acceptable for the site of administration.

[0499] Formulations and compositions thus may be designed in accordance with the invention for delivery by any suitable route of administration. In the context of the present invention, the routes of administration include, but are not limited to
[0500] topical routes (such as epicutaneous, inhalational, nasal, opthalmic, auricular/aural, vaginal, mucosal);
[0501] enteral routes (such as oral, gastrointestinal, sublingual, sublabial, buccal, rectal); and
[0502] parenteral routes (such as intravenous, intraarterial, intraosseous, intramuscular, intracerebral, intracerebroventricular, epidural, intrathecal, subcutaneous, intraperitoneal, extra-amniotic, intraarticular, intracardiac, intradermal, intralesional, intrauterine, intravesical, intravitreal, transdermal, intranasal, transmucosal, intrasynovial, intraluminal).

[0503] The pharmaceutical compositions and the antigen-binding molecule of this invention are particularly useful for parenteral administration, e.g., subcutaneous or intravenous delivery, for example by injection such as bolus injection, or by infusion such as continuous infusion. Pharmaceutical compositions may be administered using a medical device. Examples of medical devices for administering pharmaceutical compositions are described in U.S. Pat. Nos. 4,475,196; 4,439,196; 4,447,224; 4,447, 233; 4,486,194; 4,487,603; 4,596,556; 4,790,824; 4,941,880; 5,064,413; 5,312,335; 5,312,335; 5,383,851; and 5,399,163.

[0504] In particular, the present invention provides for an uninterrupted administration of the suitable composition. As a non-limiting example, uninterrupted or substantially uninterrupted, i.e. continuous administration may be realized by a small pump system worn by the patient for metering the influx of therapeutic agent into the body of the patient. The pharmaceutical composition comprising the antigen-binding molecule of the invention can be administered by using said pump systems. Such pump systems are generally known in the art, and commonly rely on periodic exchange of cartridges containing the therapeutic agent to be infused. When exchanging the cartridge in such a pump system, a temporary interruption of the otherwise uninterrupted flow of therapeutic agent into the body of the patient may ensue. In such a case, the phase of administration prior to cartridge replacement and the phase of administration following cartridge replacement would still be considered within the meaning of the pharmaceutical means and methods of the invention together make up one “uninterrupted administration” of such therapeutic agent.

[0505] The continuous or uninterrupted administration of the antigen-binding molecules of the invention may be intravenous or subcutaneous by way of a fluid delivery device or small pump system including a fluid driving mechanism for driving fluid out of a reservoir and an actuating mechanism for actuating the driving mechanism. Pump systems for subcutaneous administration may include a needle or a cannula for penetrating the skin of a patient and delivering the suitable composition into the patient's body. Said pump systems may be directly fixed or attached to the skin of the patient independently of a vein, artery or blood vessel, thereby allowing a direct contact between the pump system and the skin of the patient. The pump system can be attached to the skin of the patient for 24 hours up to several days. The pump system may be of small size with a reservoir for small volumes. As a non-limiting example, the volume of the reservoir for the suitable pharmaceutical composition to be administered can be between 0.1 and 50 ml.

[0506] The continuous administration may also be transdermal by way of a patch worn on the skin and replaced at intervals. One of skill in the art is aware of patch systems for drug delivery suitable for this purpose. It is of note that transdermal administration is especially amenable to uninterrupted administration, as exchange of a first exhausted patch can advantageously be accomplished simultaneously with the placement of a new, second patch, for example on the surface of the skin immediately adjacent to the first exhausted patch and immediately prior to removal of the first exhausted patch. Issues of flow interruption or power cell failure do not arise.

[0507] If the pharmaceutical composition has been lyophilized, the lyophilized material is first reconstituted in an appropriate liquid prior to administration. The lyophilized material may be reconstituted in, e.g., bacteriostatic water for injection (BWFI), physiological saline, phosphate buffered saline (PBS), or the same formulation the protein had been in prior to lyophilization.

[0508] The compositions of the present invention can be administered to the subject at a suitable dose which can be determined e.g. by dose escalating studies by administration of increasing doses of the antigen-binding molecule of the invention exhibiting cross-species specificity described herein to non-chimpanzee primates, for instance macaques. As set forth above, the antigen-binding molecule of the invention exhibiting cross-species specificity described herein can be advantageously used in identical form in preclinical testing in non-chimpanzee primates and as drug in humans.

[0509] The term “effective dose” or “effective dosage” is defined as an amount sufficient to achieve or at least partially achieve the desired effect. The term “therapeutically effective dose” is defined as an amount sufficient to cure or at least partially arrest the disease and its complications in a patient already suffering from the disease. Amounts or doses effective for this use will depend on the condition to be treated (the indication), the delivered antigen-binding molecule, the therapeutic context and objectives, the severity of the disease, prior therapy, the patient's clinical history and response to the therapeutic agent, the route of administration, the size (body weight, body surface or organ size) and/or condition (the age and general health) of the patient, and the general state of the patient's own immune system.

[0510] A typical dosage may range from about 0.1 g/kg to up to about 30 mg/kg or more, depending on the factors mentioned above. In specific embodiments, the dosage may range from 1.0 g/kg up to about 20 mg/kg, optionally from 10 g/kg up to about 10 mg/kg or from 100 g/kg up to about 5 mg/kg.

[0511] A therapeutic effective amount of an antigen-binding molecule of the invention preferably results in a decrease in severity of disease symptoms, an increase in frequency or duration of disease symptom-free periods or a prevention of impairment or disability due to the disease affliction. For treating diseases correlating with CS1, BCMA, CD20, CD22, FLT3, CD123, CLL1, CHD3, MSLN, or EpCAM expression as described herein above, a therapeutically effective amount of the antigen-binding molecule of the invention, here: an anti-CS1, BCMA, CD20, CD22, FLT3, CD123, CLL1, CHD3, MSLN, or EpCAM/anti-CD3 antigen-binding molecule, preferably inhibits cell growth or tumor growth by at least about 20%, at least about 40%, at least about 50%, at least about 60%, at least about 70%, at least about 80%, or at least about 90% relative to untreated patients. The ability of a compound to inhibit tumor growth may be evaluated in an animal model predictive of efficacy

[0512] The pharmaceutical composition can be administered as a sole therapeutic or in combination with additional therapies such as anti-cancer therapies as needed, e.g. other proteinaceous and non-proteinaceous drugs. These drugs may be administered simultaneously with the composition comprising the antigen-binding molecule of the invention as defined herein or separately before or after administration of said antigen-binding molecule in timely defined intervals and doses.

[0513] The term “effective and non-toxic dose” as used herein refers to a tolerable dose of an inventive antigen-binding molecule which is high enough to cause depletion of pathologic cells, tumor elimination, tumor shrinkage or stabilization of disease without or essentially without major toxic effects. Such effective and non-toxic doses may be determined e.g. by dose escalation studies described in the art and should be below the dose inducing severe adverse side events (dose limiting toxicity, DLT).

[0514] The term “toxicity” as used herein refers to the toxic effects of a drug manifested in adverse events or severe adverse events. These side events may refer to a lack of tolerability of the drug in general and/or a lack of local tolerance after administration. Toxicity could also include teratogenic or carcinogenic effects caused by the drug.

[0515] The term “safety”, “in vivo safety” or “tolerability” as used herein defines the administration of a drug without inducing severe adverse events directly after administration (local tolerance) and during a longer period of application of the drug. “Safety”, “in vivo safety” or “tolerability” can be evaluated e.g. at regular intervals during the treatment and follow-up period. Measurements include clinical evaluation, e.g. organ manifestations, and screening of laboratory abnormalities. Clinical evaluation may be carried out and deviations to normal findings recorded/coded according to NCI-CTC and/or MedDRA standards. Organ manifestations may include criteria such as allergy/immunology, blood/bone marrow, cardiac arrhythmia, coagulation and the like, as set forth e.g. in the Common Terminology Criteria for adverse events v3.0 (CTCAE). Laboratory parameters which may be tested include for instance hematology, clinical chemistry, coagulation profile and urine analysis and examination of other body fluids such as serum, plasma, lymphoid or spinal fluid, liquor and the like. Safety can thus be assessed e.g. by physical examination, imaging techniques (i.e. ultrasound, x-ray, CT scans, Magnetic Resonance Imaging (MRI), other measures with technical devices (i.e. electrocardiogram), vital signs, by measuring laboratory parameters and recording adverse events. For example, adverse events in non-chimpanzee primates in the uses and methods according to the invention may be examined by histopathological and/or histochemical methods.

[0516] The above terms are also referred to e.g. in the Preclinical safety evaluation of biotechnology-derived pharmaceuticals S6; ICH Harmonised Tripartite Guideline; ICH Steering Committee meeting on Jul. 16, 1997.

[0517] Finally, the invention provides a kit comprising an antigen-binding molecule of the invention or produced according to the process of the invention, a pharmaceutical composition of the invention, a polynucleotide of the invention, a vector of the invention and/or a host cell of the invention.

[0518] In the context of the present invention, the term “kit” means two or more components—one of which corresponding to the antigen-binding molecule, the pharmaceutical composition, the vector or the host cell of the invention—packaged together in a container, recipient or otherwise. A kit can hence be described as a set of products and/or utensils that are sufficient to achieve a certain goal, which can be marketed as a single unit.

[0519] The kit may comprise one or more recipients (such as vials, ampoules, containers, syringes, bottles, bags) of any appropriate shape, size and material (preferably waterproof, e.g. plastic or glass) containing the antigen-binding molecule or the pharmaceutical composition of the present invention in an appropriate dosage for administration (see above). The kit may additionally contain directions for use (e.g. in the form of a leaflet or instruction manual), means for administering the antigen-binding molecule of the present invention such as a syringe, pump, infuser or the like, means for reconstituting the antigen-binding molecule of the invention and/or means for diluting the antigen-binding molecule of the invention.

[0520] The invention also provides kits for a single-dose administration unit. The kit of the invention may also contain a first recipient comprising a dried/lyophilized antigen-binding molecule and a second recipient comprising an aqueous formulation. In certain embodiments of this invention, kits containing single-chambered and multi-chambered pre-filled syringes (e.g., liquid syringes and lyosyringes) are provided.

[0521] It is noted that as used herein, the singular forms “a”, “an”, and “the”, include plural references unless the context clearly indicates otherwise. Thus, for example, reference to “a reagent” includes one or more of such different reagents and reference to “the method” includes reference to equivalent steps and methods known to those of ordinary skill in the art that could be modified or substituted for the methods described herein.

[0522] Unless otherwise indicated, the term “at least” preceding a series of elements is to be understood to refer to every element in the series. Those skilled in the art will recognize, or be able to ascertain using no more than routine experimentation, many equivalents to the specific embodiments of the invention described herein. Such equivalents are intended to be encompassed by the present invention.

[0523] The term “and/or” wherever used herein includes the meaning of “and”, “or” and “all or any other combination of the elements connected by said term”.

[0524] The term “about” or “approximately” as used herein means within 20%, preferably within 10%, and more preferably within 5% of a given value or range. It includes, however, also the concrete number, e.g., about 20 includes 20.

[0525] The term “less than” or “greater than” includes the concrete number. For example, less than 20 means less than or equal to. Similarly, more than or greater than means more than or equal to, or greater than or equal to, respectively.

[0526] Throughout this specification and the claims which follow, unless the context requires otherwise, the word “comprise”, and variations such as “comprises” and “comprising”, will be understood to imply the inclusion of a stated integer or step or group of integers or steps but not the exclusion of any other integer or step or group of integer or step. When used herein the term “comprising” can be substituted with the term “containing” or “including” or sometimes when used herein with the term “having”.

[0527] When used herein “consisting of” excludes any element, step, or ingredient not specified in the claim element. When used herein, “consisting essentially of” does not exclude materials or steps that do not materially affect the basic and novel characteristics of the claim.

[0528] In each instance herein any of the terms “comprising”, “consisting essentially of” and “consisting of” may be replaced with either of the other two terms.

[0529] It should be understood that this invention is not limited to the particular methodology, protocols, material, reagents, and substances, etc., described herein and as such can vary. The terminology used herein is for the purpose of describing particular embodiments only, and is not intended to limit the scope of the present invention, which is defined solely by the claims.

[0530] All publications and patents cited throughout the text of this specification (including all patents, patent applications, scientific publications, manufacturer's specifications, instructions, etc.), whether supra or infra, are hereby incorporated by reference in their entirety. Nothing herein is to be construed as an admission that the invention is not entitled to antedate such disclosure by virtue of prior invention. To the extent the material incorporated by reference contradicts or is inconsistent with this specification, the specification will supersede any such material.

[0531] A better understanding of the present invention and of its advantages will be obtained from the following examples, offered for illustrative purposes only. The examples are not intended to limit the scope of the present invention in any way.

### EXAMPLES

### Example 1: T-Cell Dependent Cellular Cytotoxicity (TDCC) Assay with Unstimulated Human Tcells on Multichain Multitargeting Bispecific Antigen-Binding Molecules to Determine Beneficial Efficacy Gap

### Isolation of Effector Cells

[0532] Human peripheral blood mononuclear cells (PBMC) were prepared by Ficoll density gradient centrifugation from enriched lymphocyte preparations (buffy coats). Buffy coats were supplied by a local blood bank and PBMC were prepared on the day after blood collection. After Ficoll density centrifugation and washes with Dulbecco's PBS (Gibco), erythrocytes were removed from PBMC via incubation with erythrocyte lysis buffer (155 mM NH₄Cl, 10 mM KHCO₃, 100 μM EDTA). Remaining lymphocytes mainly encompass B and T lymphocytes, NK cells and monocytes. PBMC were kept in culture at 37° C./5% CO₂ in RPMI complete medium (RPMI1640 (Biochrom AG, #FG1215) supplemented with 10% Fetal Bovine Serum (FBS) (Bio West, #S1810), 1× non-essential amino acids (Biochrom AG, #K0293), 1 mM sodium pyruvate (Biochrom AG, #L0473) and 100 U/mL penicillin/streptomycin (Biochrom AG, #A2213)).

### Isolation of Human T-Cells

[0533] For isolation of human T-cells, Pan T Cell Isolation Kit, human (Miltenyi Biotec, MACS, #130-096-535) was used to deplete non-target cells, i.e., monocytes, neutrophils, eosinophils, B cells, stem cells, dendritic cells, NK cells, granulocytes, or erythroid cells from the PBMC cell solution. Cell were isolated according to the manufacturer's protocol and stored in RPMI complete medium at 37° C./5% C02 until needed.

[0534] Setup of luciferase-based T-cell-dependent cellular cytotoxicity (TDCC) assay and analysisLuciferase(LUC)-positive target-cells and effector cells (i.e., Pan T-cells) were mixed at an effector to target-cell (E:T) ratio of 10:1 and incubated with serial dilutions of the corresponding multichain multitargeting bispecific T-cell engager molecules in 384-well plates. Plates were incubated for 48 hours in a 5% CO₂ humidified incubator at 37° C.

[0535] Following target cell lines were used for the Luciferase-based cytotoxicity assay:
[0536] HCT116 WT

[0537] Parental cell line, wildtype (WT), transfected with luciferase
[0538] HCT116 MSLN KO

[0539] Parental cell line HCT 116 LUC, in which MSLN gene was knocked out (KO)
[0540] HCT116 CDH3 KO

[0541] Parental cell line HCT 116 LUC, in which CDH3 gene was knocked out (KO)
[0542] GSU WT

[0543] Parental cell line, wildtype (WT), transfected with luciferase
[0544] GSU MSLN KO

[0545] Parental cell line GSU LUC, in which MSLN gene was knocked out (KO)
[0546] GSU CDH3 KO

[0547] Parental cell line GSU LUC, in which CDH3 gene was knocked out (KO)

[0548] Upon measurement of cytotoxicity, luciferase substrate (Steady-Glo® Reagent, Promega) was added to the 384-well plates. Living cells are lysed, thereby internal luciferase is released into the supernatant creating a luminescence signal through interaction with the substrate. Samples were measured with a SPARK microplate reader (TECAN) and analyzed by Spark Control Magellan software (TECAN). Percentage of cytotoxicity was calculated as follows:

$$Cytoxicity [ \% ] = ( 1 - \frac{R L {U}_{Sample}}{R L {U}_{Negative Control}} ) \times 100$$

### RLU=Relative Light Units

[0549] Negative-Control=cells without multitargeting bispecific T-cell engager polypeptides Using GraphPad Prism 8.4.3 software (Graph Pad Software, San Diego), the percentage of cytotoxicity was plotted against the corresponding molecule concentration. Sigmoidal dose response curves were analyzed with the four parametric logistic regression models with variable slope and EC50 values were calculated.

TABLE 4
EC50 values and selectivity gaps of parental HCT116 WT cells versus target knockout
HCT116 cells.

| | | | EC50 | | EC50 |
|---|---|---|---|---|---|
| | EC50 | -fold | HCT116 | -fold | HCT116 |
| | HCT116 KO | selectivity | WT | selectivity | KO MSLN |
| | CDH3 [pM] | gap | [pM] | gap | [pM] |
| CDH3 T-cell engager | b.c.t. | — | 0.53 | 1 | 0.65 |
| molecule 1 | | | | | |
| MSLN T-cell engager | 0.86 | 1 | 0.76 | — | b.c.t. |
| molecule 1 | | | | | |
| MSLN-CDH3 T-cell | 1.76 | 600 | 0.003 | 367 | 1.08 |
| engager molecule 1 | | | | | |
| MSLN-CDH3 T-cell | 3.48 | 266 | 0.013 | 135 | 1.77 |
| engager molecule 2 | | | | | |
| MSLN-CDH3 T-cell | 3.19 | 623 | 0.005 | 74 | 0.38 |
| engager molecule 3 | | | | | |
| MSLN-CDH3 T-cell | 3.50 | 130 | 0.027 | 23 | 0.62 |
| engager molecule 4 | | | | | |
| MSLN-CDH3 T-cell | 8.07 | 207 | 0.039 | 58 | 2.25 |
| engager molecule 5 | | | | | |
| MSLN-CDH3 T-cell | 0.58 | 279 | 0.002 | 132 | 0.27 |
| engager molecule 6 | | | | | |
| MSLN-CDH3 T-cell | 25.5 | 635 | 0.040 | 37 | 1.50 |
| engager molecule 7 | | | | | |

b.c.t: below calculation threshold

[0550] Results: CDH3 T-cell engager molecule 1 and MSLN T-cell engager molecule 1, that only target either CDH3 or MSLN, demonstrate comparable activity on single positive knockout cells vs. double positive cells HCT116 WT cells. MSLN-CDH3 T-cell engager molecules 1, 2, 3, 4, 5, 6 and 7 all show highly increased activity on double positive HCT116 WT cells compared to target knockout HCT116 cells. The EC50 selectivity gaps between double positive WT cells and CDH3 knockout cells varies within the T-cell engager molecules between 130-and 635-fold, the EC50 selectivity gaps between double positive WT cells and MSLN knockout cells varies between 23-and 367-fold. Table 5: EC50 values and selectivity gaps of parental GSU WT cells versus target knockout GSU cells. b.c.t.: below calculation threshold

TABLE 5
EC50 values and selectivity gaps of parental GSU WT cells versus target
knockout GSU cells.

| | EC50 GSU | -fold | EC50 GSU | -fold | EC50 GSU |
|---|---|---|---|---|---|
| | KO CDH3 | selectivity | WT | selectivity | KO MSLN |
| | [pM] | gap | [pM] | gap | [pM] |
| CDH3 T-cell engager | b.c.t. | — | 9.9 | 2 | 23.8 |
| molecule 1 | | | | | |
| MSLN T-cell engager | 0.31 | 1 | 0.41 | — | b.c.t. |
| molecule 1 | | | | | |
| MSLN-CDH3 T-cell | 0.47 | 37 | 0.013 | 8238 | 103.2 |
| engager molecule 1 | | | | | |
| MSLN-CDH3 T-cell | 2.50 | 64 | 0.039 | 8913 | 349.4 |
| engager molecule 2 | | | | | |
| MSLN-CDH3 T-cell | 7.50 | 103 | 0.073 | 761 | 55.3 |
| engager molecule 3 | | | | | |
| MSLN-CDH3 T-cell | 2.89 | 29 | 0.098 | 374 | 36.8 |
| engager molecule 4 | | | | | |
| MSLN-CDH3 T-cell | 10.5 | 82 | 0.128 | 1369 | 174.8 |
| engager molecule 5 | | | | | |
| MSLN-CDH3 T-cell | 0.89 | 37 | 0.024 | 483 | 11.6 |
| engager molecule 6 | | | | | |
| MSLN-CDH3 T-cell | 54.6 | 209 | 0.261 | 363 | 95.0 |
| engager molecule 7 | | | | | |

b.c.t.: below calculation threshold

[0551] Results: CDH3 T-cell engager molecule 1 and MSLN T-cell engager molecule 1, that only target either CDH3 or MSLN, demonstrate comparable activity on single positive knockout cells vs. double positive cells GSU WT cells (1-to 2-fold selectivity gap). MSLN-CDH3 T-cell engager molecules 1, 2, 3, 4, 5, 6 and 7 all show increased activity on double positive GSU WT cells compared to target knockout GSU cells. The EC50 selectivity gaps between double positive and CDH3 knockout cells varies within the T-cell engager molecules between 29-and 209-fold, the EC50 selectivity gaps between double positive and MSLN knockout cells varies between 363-and 8238-fold.

[0552] MSLN-CDH3 T-cell engager molecule 1 is a single chain multitargeting bispecific antigen-binding molecule, more specifically a T-cell engager molecule), with one bispecific entity (target binding domain and CD3 binding domain) at the N-terminus of a spacer and one bispecific entity at the C-terminus of the polypeptide, separated by a single chain Fc-domain as spacer. In MSLN-CDH3 T-cell engager molecule 2, the bispecific entities are separated by a heterodimer domain (heteroFc) that connects two multitargeting bispecific T-cell engager polypeptides and spaces apart the first and the second bispecific entity. MSLN-CDH3 T-cell engager molecules 3-7 are multichain multitargeting bispecific T-cell engager polypeptides (MMBiTEP), with one target binding domain and one CD3 binding domain forming a bispecific entity at the N-terminus of the polypeptide chains and one target binding domain and one CD3 binding domain forming another bispecific entity at the C-terminus of the polypeptide chains, separated by a hetero Fc domain spacer. The target and CD3 binding domains and their arrangements vary between constructs 3-7, but they all share the separation of the bispecific entities between N- and C-terminus of the polypeptides of the heteroFc spacer.

| Legend to tables/figures | Seq ID | Binder detailed description |
|---|---|---|
| CDH3 T-cell engager | Seq ID 1284 | CH3-G8A_6-B12 x 12Cx scFc |
| molecule 1 | | |
| (control) | | |
| MSLN T-cell engager | Seq ID 1285 | MS 5-F11 x I2C x scFc |
| molecule 1 | | |
| (control) | | |
| MSLN-CDH3 T-cell | Seq ID 1272 | antiCDH3_01 scFv x I2L scFv x scFc x |
| engager molecule 1 | | antiMSLN_01 scFv x I2L scFv |
| (scFc single chain) | | |
| MSLN-CDH3 T-cell | Seq ID 1259 + | antiCDH3_01 scFv x I2L scFv x |
| engager molecule 2 | 1251 | heFc(A)*heFc(B) x antiMSLN_01 scFv x |
| (heteroFc multichain) | | I2L |
| MSLN-CDH3 T-cell | Seq ID 1247 + | antiCDH3_01 scFv x heFc(A) x |
| engager molecule 3 | 1248 | antiMSLN_01 scFv *I2L scFv x heFc(B) x |
| (example to FIG. 2A) | | I2L scFv |
| MSLN-CDH3 T-cell | Seq ID 1249 + | antiCDH3_01 scFv x heFc(A) x I2L scFv * |
| engager molecule 4 | 1250 | I2L scFv x heFc(B) x antiMSLN_01 scFv |
| (example to FIG. 2B) | | |
| MSLN-CDH3 T-cell | Seq ID 1254 + | antiCDH3_01 Fab x heFc(A) x 12L scFv* |
| engager molecule 5 | 1255 + 1253 | I2L scFv x heFc(B) x antiMSLN_01 scFv |
| (example to FIG. 2D) | | |
| MSLN-CDH3 T-cell | Seq ID 1252 + | antiCDH3_01 Fab x heFc(A) * I2L Fab x |
| engager molecule 6 | 1257 + 1253 + | heFc(B) x antiMSLN_01 scFv x I2L scFv |
| (example to FIG. 2L) | 1256 | |
| MSLN-CDH3 T-cell | Seq ID 1254 + | antiCDH3_01 Fab x heFc(A) x 12L scFv * |
| engager molecule 7 | 1258 + 1253 + | I2L Fab x heFc(B) x antiMSLN_01 scFv |
| (example to FIG. 2K) | 1256 | |

TABLE 6
EC50 values and selectivity gaps of parental GSU WT cells versus target knockout GSU cells.

| | EC50 GSU | -fold | EC50 GSU | -fold | EC50 GSU |
|---|---|---|---|---|---|
| | KO CDH3 | selectivity | WT | selectivity | KO MSLN |
| | [pM] | gap | [pM] | gap | [pM] |
| CDH3 T-cell | b.c.t. | b.c.t. | 125.52 | 0.82 | 102.58 |
| engager | | | | | |
| molecule 1 | | | | | |
| MSLN T-cell | 2.83 | 1.4 | 2.01 | b.c.t. | b.c.t. |
| engager | | | | | |
| molecule 1 | | | | | |
| MSLN-CDH3 | 735 | 5.6 | 132.0 | 276.6 | 36525 |
| T-cell engager | | | | | |
| molecule 24 | | | | | |

b.c.t.: below calculation threshold involving a Fab comprising multichain multitargeting bispecific T-cell engager molecule

[0553] Results are shown in FIG. 6, i.e. Cytotoxicity curves of CDH3 T-cell engager molecule 1, MSLN T-cell engager molecule 1 and MSLN-CDH3 T-cell engager molecule 24 on parental double positive GSU WT cells versus target-knockout GSU cells. Effector cells were unstimulated Pan T-cells.

[0554] Results: CDH3 T-cell engager molecule 1 and MSLN T-cell engager molecule 1 that only target either CDH3 or MSLN, demonstrate comparable activity on single positive knockout cells vs. double positive GSU WT cells (0.8-to 1.4-fold selectivity gap). MSLN-CDH3 T-cell engager molecule 24 shows an increased activity on double positive GSU WT cells compared to target knockout GSU cells. The EC50 selectivity gap between double positive WT cells and CDH3 knockout cells was 5.6-fold, the EC50 selectivity gap between double positive WT cells and MSLN knockout cells was 276.6-fold.

[0555] MSLN-CDH3 T-cell engager molecule 24 is a multichain multitargeting bispecific T-cell engager molecule, with one Fab target binding domain and one CD3 scFv binding domain forming a bispecific entity at the N-terminus of the polypeptide chain and one Fab target binding domain and one scFv CD3 binding domain forming another bispecific entity at the C-terminus of the polypeptide chain, separated by a scFc domain.

| Legend | |
|---|---|
| CDH3 T-cell engager | CH3-G8A_6-B12 x 12Cx scFc |
| molecule 1 | |
| (control) | |
| MSLN T-cell | MS 5-F11 x I2C x scFc |
| engager molecule 1 | |
| (control) | |
| MSLN-CDH3 T-cell | antiCDH3_01 Fab x I2L scFv x scFc |
| engager molecule 24 | x antiMSLN_01 Fab x I2L scFv |
| (example to FIG. 3I) | |

### Example 2 Thermal Stability of Multitargeting Bispecific Antigen-Binding Molecules Consisting of a Singlechain or Multichains with Various Domains or Arrangements

Determination of Aggregation and Melting Temperature T_{agg} and Tₘ

[0556] Multitargeting bispecific antigen-binding molecules were measured in a NanoTemper Prometheus Panta in triplicates and the aggregation temperature T_{agg} and melting temperature Tₘ was determined. The thermal unfolding assay was performed at 25° C.-95° C. with a heating rate of 1° C./min and high sensitivity mode ON. The aggregation temperature T_{agg} (° C.) is defined as the onset of the cumulant radius (nm), measured with dynamic light scattering (DLS). The melting temperature Tₘ (° C.) is based on the changes in fluorescence to evaluate protein unfolding and/or aggregation and defines the point at which 50% of the molecule is unfolded. The Tₘ is defined as the first inflection point of the ratio 350 nm/330 nm of a thermal unfolding assay (first maxima of the first derivative of the ratio 350 nm/330 nm).

TABLE X
Aggregation temperature (T_{agg}) and melting temperature (Tₘ)

| | T_{agg} [° C.] | Tₘ [° C.] |
|---|---|---|
| MSLN-CDH3 T-cell | 64.0 | 68.8 |
| engager molecule 1 | | |
| MSLN-CDH3 T-cell | 65.7 | 68.2 |
| engager molecule 5 | | |
| MSLN-CDH3 T-cell | 66.2 | 69.9 |
| engager molecule 6 | | |
| MSLN-CDH3 T-cell | 65.2 | 70.3 |
| engager molecule 7 | | |

[0557] Results: MSLN-CDH3 T-cell engager molecules 1, 5, 6 and 7 show aggregation temperatures over 64° C., with MSLN-CDH3 T-cell engager molecule 6 showing the highest aggregation temperature of 66.2° C. The melting temperature of all 4 molecules is higher than 68.2° C., with MSLN-CDH3 T-cell engager molecule 7 exhibiting the highest melting temperature of 70.3° C. The molecules were also tested regarding long-term storage stability and freeze-thaw stability and all molecules exhibited comparable characteristics.

[0558] MSLN-CDH3 T-cell engager molecule 1 is a single chain multitargeting bispecific antigen-binding molecule, with one bispecific entity (target binding domain and CD3 binding domain) at the N-terminus and one bispecific entity at the C-terminus of the molecule, separated by a single chain Fc-domain. MSLN-CDH3 T-cell engager molecules 5,6 and 7 are multichain multitargeting bispecific antigen-binding molecules, with one target binding domain and one CD3 binding domain forming a bispecific entity at the N-terminus of the polypeptide chains and one target binding domain and one CD3 binding domain forming another bispecific entity at the C-terminus of the polypeptide chains, separated by a hetero Fc domain. The target and CD3 binding domains and their arrangements vary between constructs 5-7. The presented data demonstrates, that multichain multitargeting bispecific antigen-binding molecules are at least as resistant to high temperatures as single chain multitargeting bispecific antigen-binding molecules.

| Legend | Seq ID | |
|---|---|---|
| MSLN-CDH3 T-cell | Seq ID 1272 | antiCDH3_01 scFv x I2L scFv x |
| engager molecule 1 | | scFc x antiMSLN_01 scFv x |
| | | I2L scFv |
| MSLN-CDH3 T-cell | Seq ID 1254 + | antiCDH3_01 Fab x heFc(A) x |
| engager molecule 5 | 1255 + 1253 | I2L scFv* I2L scFv x heFc(B) x |
| | | antiMSLN_01 scFv |
| MSLN-CDH3 T-cell | Seq ID 1252 + | antiCDH3_01 Fab x heFc(A) * |
| engager molecule 6 | 1257 + 1253 + | I2L Fab x heFc(B) x |
| | 1256 | antiMSLN_01 scFv x I2L scFv |
| MSLN-CDH3 T-cell | Seq ID 1254 + | antiCDH3_01 Fab x heFc(A) x |
| engager molecule 7 | 1258 + 1253 + | I2L scFv * I2L Fab x heFc(B) x |
| | 1256 | antiMSLN_01 scFv |

Lengthy table referenced here
US20260167720A1-20260618-T00001
Please refer to the end of the specification for access instructions.

LENGTHY TABLES
The patent application contains a lengthy table section. A copy of the table is available in electronic form from the USPTO web site (https://seqdata.uspto.gov/docdetail?docId=US20260167720A1). An electronic copy of the table will also be available from the USPTO upon request and payment of the fee set forth in 37 CFR 1.19(b)(3).

1. A molecule comprising at least two polypeptide chains, wherein the molecule comprises
(i) a first binding domain which binds to a first target cell surface antigen (TAA1),
(ii) a second binding domain which binds to an extracellular epitope of the human and/or the Macaca CD3 chain,
(iii) a third binding domain which binds to a second target cell surface antigen (TAA2), and
(iv) a fourth binding domain which binds to an extracellular epitope of the human and/or the Macaca CD3 chain,
wherein the molecule further comprises
an Fc domain comprising a first and a second polypeptide monomer comprising a hinge, a CH2 domain and a CH3 domain, respectively, wherein the first and second polypeptide monomer form a heterodimer; wherein the heterodimer is formed by
(a) charged pair mutations selected from the qroup consisting of:
(i) D399K, K409D, K392D, and E356K;
(ii) D399K, K409D, K392D, E357K, K370D, and E356K;
(iii) D399K, K409D, K392D, E356K and K439D;
(iv) D399K, K409D, and K392D;
(v) D399K, K409D, K392D, E357K and E370K;
(vi) D399K, K409D, K392D, E357K, K370E and K360E;
(vii) D399K, K409D, K392D, E357K, K370E, E356K, and K439E; and
(viii) D399K, K409D, K392D, E357K, K370E, K360E, E356K, and K439D, and preferably comprising a K392D, K409D and/or K439D mutation in the CH3 domain of the first polypeptide monomer and comprising a E356K and/or D399K mutation in the CH3 domain of the second polypeptide monomer, wherein the amino acid positions are designated accordinq to EU numbering;
or
(b) knobs-into-holes mutations comprising preferably a T366S, L368 Å and Y407 mutation in the first polypeptide monomer and a T366W mutation in the second monomer, wherein the amino acid positions are designated according to EU numbering,
wherein the dimerizing domain comprises two N-termini and two C-termini, respectively, whereof at least one N-terminus and one C-terminus, respectively, is linked to a bispecific entity, wherein any of the first, second, third and fourth domain is selected from any form of binding domain, Preferably selected from a Fab and a single chain domain, the single chain domain Preferably selected from single chain Fv (scFv) and Fab;
wherein the distance between the C alpha atoms of the first amino acid located at the N-terminus and the last amino acid at the C-terminus of the spacer entity are spaced apart by at least 30 Å, wherein the spacer entity spaces apart the first and the second bispecific entity by at least a distance of about 50 Å, wherein the indicated distance is preferably understood as the distance between centers of mass (i) of the first and the third binding domain or (ii) the first and the second bispecific entity, wherein the spacer entity is positioned between the first and the second bispecific entity, wherein the first target cell surface antigen and the second target cell surface antigen are not identical, and
wherein preferably the first binding domains is capable of binding to the first target cell surface antigen and the third binding domain is capable of binding to the second target cell surface antigen simultaneously, preferably wherein the first target cell surface antigen and the second target cell surface antigen are on the same target cell.

2. (canceled)

3. The antigen-binding molecule of claim 1, wherein when the spacer is a single chain domain, the arrangement of the binding domains in an amino to carboxyl order is selected from the group consisting of
(i) first and second domain, spacer, third and fourth domain;
(ii) first and second domain, spacer, fourth and third domain;
(iii) second and the first domain, spacer, third and fourth domain; and
(iv) second and first domain, spacer, fourth and third domain,
wherein preferably when the spacer is a single chain domain, the arrangement of the binding domains in an amino to carboxyl order is selected from the group consisting of:
(i) first domain in the format of Fab, second domain in the format of a single chain domain, preferably scFv, spacer, third domain in the format of Fab and fourth domain in the format of a single chain domain, preferably scFv;
(ii) first domain in the format of Fab, second domain in the format of Fab, spacer, third domain in the format of Fab and fourth domain in the format of Fab;
(iii) first domain in the format of a single chain domain, preferably scFv, second domain in the format of Fab, spacer, third in the format of scFv and fourth domain in the format of Fab;
(iv) first domain in the format of a single chain domain, preferably scFv, second domain in the format of scFv, spacer, third in the format of scFv and fourth domain in the format of Fab;
(v) first domain in the format of a single chain domain, preferably scFv, second domain in the format of a single chain domain, preferably scFv, spacer, third in the format of Fab and fourth domain in the format of a single chain domain, preferably scFv;
(vi) first domain in the format of Fab, second domain in the format of a single chain domain, preferably scFv, spacer, third in the format of a single chain domain, preferably scFv and fourth domain in the format of a single chain domain, preferably scFv; and
(vii) first domain in the format of a single chain domain, preferably scFv, second domain in the format of Fab, spacer, third in the format of a single chain domain, preferably scFv and fourth domain in the format of a single chain domain, preferably scFv,
wherein each scFv comprises in an amino to carboxyl order VH, linker and VL or VL, linker and VH, preferably VH, linker and VL.

4. (canceled)

5. The antigen-binding molecule of claim 1, wherein when the spacer is the spacer is a dimerizing domain, the arrangement of the binding domains in an amino to carboxyl order is selected from the group consisting of
(i) a first chain comprising the VL and CL of the first domain, a second chain comprising the VH and CH1 of the first domain, forming a Fab together with the first chain, second domain in the format of scFv, first polypeptide monomer of the spacer dimerizing domain, and a third chain comprising the second polypeptide monomer of the spacer dimerizing domain, the third domain comprising the VH and CH1 of the third domain, forming a Fab together with the VL and CL of the third domain on the fourth chain, and a fourth chain comprising the VL and CL of the third domain, and the fourth domain in the format of a scFv;
(ii) first domain in the format of Fab, second domain in the format of Fab, spacer comprising first and second polypeptide monomer of the spacer dimerizing domain, third domain in the format of Fab and fourth domain in the format of Fab;
(iii) a first chain comprising the second domain in the format of scFv, the VH and CH1 of the first domain, forming a Fab together with the second chain, first polypeptide monomer of the spacer dimerizing domain, a second chain comprising the VL and CL of the first domain, a third chain comprising the second polypeptide monomer of the spacer dimerizing domain, the third domain comprising the VH and CH1 of the third domain, forming a Fab together with the VL and CL of the third domain on the fourth chain, and a fourth chain comprising the VL and CL of the third domain, and the fourth domain in the format of a scFv;
(iv) a first chain comprising the second domain in the format of scFv, the VH and CH1 of the first domain, forming a Fab together with the second chain, first polypeptide monomer of the spacer dimerizing domain, a second chain comprising the VL and CL of the first domain, a third chain comprising the second polypeptide monomer of the spacer dimerizing domain, the fourth domain in the format of a scFv, the third domain comprising the VH and CH1 of the third domain, forming a Fab together with the VL and CL of the third domain on the fourth chain, and a fourth chain comprising the VL and CL of the third domain; and
(v) a first chain comprising the second domain in the format of scFv, the VH and CH1 of the first domain, forming a Fab together with the second chain, first polypeptide monomer of the spacer dimerizing domain, a second chain comprising the VL and CL of the first domain, a third chain comprising the second polypeptide monomer of the spacer dimerizing domain, the fourth domain in the format of a scFv, the third domain comprising the VH and CH1 of the third domain, forming a Fab together with the VL and CL of the third domain on the fourth chain, and a fourth chain comprising the VL and CL of the third domain;
wherein each scFv comprises in an amino to carboxyl order VH, linker and VL or VL, linker and VH, preferably VH, linker and VL.

6. The antigen-binding molecule of claim 1, wherein when the spacer is a dimerizing domain, the arrangement of the binding domains is in an amino to carboxyl order and is selected from the group consisting of
(i) a first chain comprising the first domain in the format of scFv, first polypeptide monomer of the spacer dimerizing domain, third domain in the format of scFv and a second chain comprising the second domain in the format of scFv, second polypeptide monomer of the spacer dimerizing domain, fourth domain in the format of scFv;
(ii) a first chain comprising the first domain in the format of scFv, first polypeptide monomer of the spacer dimerizing domain, second domain in the format of scFv and a second chain comprising the third domain in the format of scFv, second polypeptide monomer of the spacer dimerizing domain, fourth domain in the format of scFv;
(iii) a first chain comprising the VL and CL of the first domain, a second chain comprising the VH and CH1 of the first domain, forming a Fab together with the first chain, first polypeptide monomer of the spacer dimerizing domain, third domain in the format of scFv, and a third chain comprising the second domain in the format of scFv, second polypeptide monomer of the spacer dimerizing domain, fourth domain in the format of scFv;
(iv) a first chain comprising the VL and CL of the first domain, a second chain comprising the VH and CH1 of the first domain, forming a Fab together with the first chain, first polypeptide monomer of the spacer dimerizing domain, second domain in the format of scFv, and a third chain comprising the fourth domain in the format of scFv, second polypeptide monomer of the spacer dimerizing domain, third domain in the format of scFv;
(v) a first chain comprising the VL and CL of the first domain, a second chain comprising the VH and CH1 of the first domain, forming a Fab together with the first chain, first polypeptide monomer of the spacer dimerizing domain, and a third chain comprising the second domain in the format of scFv, second polypeptide monomer of the spacer dimerizing domain, third domain in the format of scFv, and fourth domain in the format of scFv;
(vi) a first chain comprising the VL and CL of the first domain, a second chain comprising the VH and CH1 of the first domain, forming a Fab together with the first chain, first polypeptide monomer of the spacer dimerizing domain, third domain in the format of scFv, and fourth domain in the format of scFv, and a third chain comprising the second domain in the format of scFv, second polypeptide monomer of the spacer dimerizing domain;
(vii) a first chain comprising the VL and CL of the first domain, a second chain comprising the VH and CH1 of the first domain, forming a Fab together with the first chain, first polypeptide monomer of the spacer dimerizing domain, VH and CH1 of the third domain forming a Fab together with the third chain, a third chain comprising the VL and CL of the third domain, a forth chain comprising the VH and CH1 of the second domain, forming a Fab together with the fifth chain, second polypeptide monomer of the spacer dimerizing domain, VH and CH1 of the third domain forming a Fab together with the sixth chain, a fifth chain comprising the VL and CL of the second domain, and a sixth chain comprising the VL and CL of the fourth domain;
(viii) a first chain comprising the VL and CL of the first domain, a second chain comprising the VH and CH1 of the first domain, forming a Fab together with the first chain, first polypeptide monomer of the spacer dimerizing domain, second domain in the format of scFv, a third chain comprising the fourth domain in the format of scFv, second polypeptide monomer of the spacer dimerizing domain, VH and CH1 of the third domain, forming a Fab together with the fourth chain, and a fourth chain comprising the VL and CL of the third domain;
(ix) a first chain comprising the first domain in the format of a scFv, the first polypeptide monomer of the spacer dimerizing domain, the third domain in the format of scFv, a third chain comprising the VH and CH1 of the second domain, forming a Fab together with the third chain, the second polypeptide monomer of the spacer dimerizing domain, the VH and CH1 of the fourth domain, forming a Fab together with the fourth chain, a third chain comprising the VL and CL of the second domain, and a fourth chain comprising the VL and CL of the fourth domain;
(x) a first chain comprising the VL and CL of the first domain, a second chain comprising the VH and CH1 of the first domain, forming a Fab together with the first chain, first polypeptide monomer of the spacer dimerizing domain, the third domain in the format of scFv, a third chain comprising the VH and CH1 of the second domain, forming a Fab together with the fourth chain, second polypeptide monomer of the spacer dimerizing domain, the fourth domain in the format of a scFv, and a fourth chain comprising the VL and CL of the second domain;
(xi) a first chain comprising the VL and CL of the first domain, a second chain comprising the VH and CH1 of the first domain, forming a Fab together with the first chain, first polypeptide monomer of the spacer dimerizing domain, the second domain in the format of scFv, a third chain comprising the VH and CH1 of the fourth domain, forming a Fab together with the fourth chain, second polypeptide monomer of the spacer dimerizing domain, the third domain in the format of a scFv, and a fourth chain comprising the VL and CL of the fourth domain;
(xii) a first chain comprising the VL and CL of the first domain, a second chain comprising the VH and CH1 of the first domain, forming a Fab together with the first chain, first polypeptide monomer of the spacer dimerizing domain, a third chain comprising the VH and CH1 of the second domain, forming a Fab together with the fourth chain, second polypeptide monomer of the spacer dimerizing domain, the third domain in the format of scFv, the fourth domain in the format of a scFv, and a fourth chain comprising the VL and CL of the second domain; and
(xiii) a first chain comprising the VL and CL of the first domain, a second chain comprising the VH and CH1 of the first domain, forming a Fab together with the first chain, first polypeptide monomer of the spacer dimerizing domain, the third domain in the format of scFv, the fourth domain in the format of a scFv, a third chain comprising the VH and CH1 of the second domain, forming a Fab together with the fourth chain, second polypeptide monomer of the spacer dimerizing domain, and a fourth chain comprising the VL and CL of the second domain;
wherein each scFv comprises in a N to C orientation VH, linker and VL or VL, linker and VH, preferably VH, linker and VL.

7-8. (canceled)

9. The antigen-binding molecule of claim 1, wherein said spacer entity when single chained is at least one Fc domain, preferably one domain or two or three covalently linked domains, which or each of which comprises in an amino to carboxyl order: [chemical structure]
wherein preferably each of said polypeptide monomers in the spacer entity has an amino acid sequence that is at least 90% identical to a sequence selected from the group consisting of: SEQ ID NO: 17-24, wherein preferably each of said polypeptide monomers has an amino acid sequence selected from SEQ ID NO: 17-24,
wherein preferably the CH2 domains in the spacer comprises an intra domain cysteine disulfide bridge, or
wherein the spacer entity comprises an amino acid sequence selected from the group consisting of: the amino acid sequence of SEQ ID NO: 13, 15, 16, and 25-34.

10-12. (canceled)

13. The antigen-binding molecule of claim 1, wherein the first peptide monomer of the first peptide chain in the dimerizing spacer is SEQ ID NO 35 and the second peptide monomer of the second peptide chain in the dimerizing spacer is SEQ ID NO 36, and wherein the two peptide monomers preferably form a heterodimer.

14. The antigen-binding molecule of claim 1, wherein the antigen-binding molecule is characterized by
(i) the first and third domain comprise two antibody-derived variable domains and the second and the fourth domain comprises two antibody-derived variable domains;
(ii) the first and third domain comprise one antibody-derived variable domain and the second and the fourth domain comprises two antibody-derived variable domains;
(iii) the first and third domain comprise two antibody-derived variable domains and the second and the fourth domain comprises one antibody-derived variable domain; or
(iv) the first domain comprises one antibody-derived variable domain and the third domain comprises one antibody-derived variable domain.

15. The antigen-binding molecule of claim 1, wherein the antigen-binding molecule comprises two polypeptide chains, wherein
the first polypeptide chain comprises a VH of the first domain, a VH second domain, the first polypeptide monomer comprising preferably a hinge, a CH2 and a CH3 domain, a VH of the third domain, and a VH of the fourth domain; and
the second polypeptide chain comprises a VL of the first domain, a VL second domain, the first polypeptide monomer comprising preferably a hinge, a CH2 and a CH3 domain, a VL of the third domain, and a VL of the fourth domain,
wherein preferably the first and second polypeptide monomer form a heterodimer, thereby connecting the first and the second polypeptide chain.

16. The antigen-binding molecule of claim 1, wherein the first, second, third and fourth binding domain each comprise in an amino to carboxyl order a VH domain and a VL domain, wherein the VH and VL within each domain is connected by a peptide linker, preferably a flexible linker which comprises serine, glutamine and/or glycine as amino acid building blocks, preferably only serine (Ser, S) or glutamine (Gln, Q) and glycine (Gly, G), more preferably (G4S)n or (G4Q)n, even more preferably SEQ ID NO: 1 or 3,
wherein the peptide linker preferably comprises or consists of S(G4X)n and (G4X)n,
wherein X is an amino acid selected from the group consisting of: Q, T, N, C, G, A, V, I, L, and M, wherein n is an integer selected from integers 1 to 20, preferably wherein n is 1, 2, 3, 4,5 or 6, preferably wherein X is Q, wherein preferably the peptide linker is (G4X)n, n is 3, and X is Q,
wherein the peptide linker between the first binding domain and the second binding domain and the third binding domain and the fourth binding domain is preferably a flexible linker which comprises serine, glutamine and/or glycine or glutamic acid, alanine and lysine as amino acid building blocks, preferably the amino acid sequence selected from the qroup consisting of: SEQ ID NO: 1-4, 6-12, and 1125, and
wherein the peptide linker between the first binding domain or the second binding domain and the spacer, and/or the third binding domain and the fourth binding domain and the spacer, respectively, is preferably a short linker rich in small and/or hydrophilic amino acids, preferably glycine and preferably the amino acid sequence of SEQ ID NO: 5 . . . .

17-19. (canceled)

20. The antigen-binding molecule of claim 1, wherein any of the first target cell surface antigen and the second target cell surface antigen is selected from the group consisting of CS1, BCMA, CDH3, FLT3, CD123, CD20, CD22, EpCAM, MSLN and CLL1, wherein preferably the first target cell surface antigen and the second target cell surface antigen, respectively, are target cell surface antigens selected from the group consisting of CS1 and BCMA, BCMA and CS1, FLT3 and CD123, CD123 and FLT3, CD20 and CD22, CD22 and CD20, EpCAM and MSLN, MSLN and EpCAM, MSLN and CDH3, CDH3 and MSLN, FLT3 and CLL1, and CLL1 and FLT3.

21-30. (canceled)

31. The antigen-binding molecule of claim 1, wherein the second and the fourth binding domain comprise a VH region comprising CDR-H 1, CDR-H2 and CDR-H3 selected from SEQ ID NOs 37 to 39, 45 to 47, 53 to 55, 61 to 63, 69 to 71, 436 to 438, 1126 to 1128, 1136 to 1138, 1142 to 1144, 1148 to 1150, and 1217 to 1219 and a VL region comprising CDR-L1, CDR-L2 and CDR-L3 selected from SEQ ID NOs 40 to 42, 48 to 50, 56 to 58, 64 to 66, 72 to 74, 439 to 441, 1129 to 1131, 1139 to 1141, 1145 to 1147, 1151 to 1153, and 1220 to 1222, preferably 61 to 63 and 64 to 66 or 1217 to 1219 and 1220 to 1222, wherein preferably the second and fourth binding domain comprise a VH region selected from SEQ ID NOs 43, 51, 59, 67, 75, 442, 1132 and 1223, preferably 67 or 1223, and wherein preferably the second and fourth binding domain comprise a VL region selected from SEQ ID NOs 44, 52, 60, 68, 76, 443 1133 and 1224, preferably 68 or 1224, and wherein preferably the second and fourth binding domain comprising a VH region selected from SEQ ID NOs 43, 51, 59, 67, 75, 442, 1132 and 1223, preferably 67, and a VL region selected from SEQ ID NOs 44, 52, 60, 68, 76, 443, 1133 and 1224, preferably 68, wherein when the VH region is 1132 and the VL region is 1133, the second and/or fourth binding domain as scFab domain additionally comprises a CH1 domain of SEQ ID NO: 1134 and a CLK domain of SEQ ID NO: 1135, and wherein the VH and VL region are linked to each other by a linker preferably selected from SEQ ID NO 1, 3 and 1125, or wherein the VH of the VH-CH1 of the second and forth domain is SEQ ID NO is SEQ ID NO 1223, and the CH1 of the VH-CH1 of the second and fourth domain is SEQ ID NO is SEQ ID NO 1224, and the VL of the VL-CL of the second and fourth domain is SEQ ID NO is SEQ ID NO 1225, and the CL of the VL-L of the second and fourth domain is SEQ ID NO is SEQ ID NO 1226.

32-38. (canceled)

39. The antigen-binding molecule of claim 1, wherein the first and/or the third (target) binding domain comprise a VH region comprising CDR-H 1, CDR-H2 and CDR-H3 selected from SEQ ID NO: 77 to 79, 86 to 88, 95 to 97, 103 to 105, 111 to 113, 119 to 121, 127 to 129, 135 to 137, 143 to 145, 151 to 153, 159 to 161, 168 to 170, 177 to 179, 185 to 187, 194 to 196, 203 to 205, 212 to 214, 221 to 223, 230 to 232, 238 to 240, 334 to 336, 356 to 358, 365 to 367, 376 to 378, 385 to 387 and 194, 432 and 196, 446 to 448, 454 to 456, 462 to 464, 470 to 472, 478 to 480, 486 to 488, 494 to 496, 502 to 504, 510 to 512, 518 to 520, 526 to 528, 534 to 536, 542 to 544, 550 to 552, 558 to 560, 566 to 568, 574 to 576, 582 to 584, 590 to 592, 598 to 600, 606 to 608, 614 to 616, 622 to 624, 630 to 632, 638 to 640, 646 to 648, 654 to 656, 662 to 664, 670 to 672, 678 to 680, 686 to 688, 694 to 696, 702 to 704, 710 to 712, 718 to 720, 726 to 728, 734 to 736, 742 to 744, 750 to 752, 758 to 760, 766 to 768, 774 to 776, 782 to 784, 790 to 792, 798 to 800, 806 to 808, 814 to 816, 822 to 826, 830 to 832, 838 to 840, 846 to 848, 854 to 856, 862 to 864, 870 to 872, 878 to 880, 886 to 888, 894 to 896, 902 to 904, 910 to 912, 918 to 920, 926 to 928, 934 to 936, 942 to 944, 950 to 952, 958 to 960, 966 to 968, 974 to 976, 982 to 984, 990 to 992, 998 to 1000, 1006 to 1008, 1014 to 1016, 1022 to 1024, 1030 to 1032, 1038 to 1040, 1046 to 1048, 1054 to 1056, and 1062 to 1064, or preferably any combination of CDR-H 1, CDR-H2 and CDR-H3 as disclosed together in the sequence table Tab. 6, preferably 86 to 88 and 194, 432 and 196 for the first and the third binding domain, respectively, more preferably 194, 432 and 196 for the first and 86 to 88 for the third binding domain or 1227 to 1229 and 1237 to 1239 for the first and third binding domain.

40. (canceled)

41. The antigen-binding molecule of claim 1, wherein the first and/or third (target) binding domain comprise a VH region selected from SEQ ID NO: 83, 92, 101, 109, 117, 125, 133, 141, 149, 157, 165, 174, 183, 191, 200, 209, 218, 227, 236, 244, 340, 362, 371, 382, 391, and 433, 452, 460, 468, 476, 484, 492, 500, 508, 516, 524, 532, 540, 548, 556, 564, 572, 580, 588, 596, 604, 612, 620, 628, 636, 644, 652, 660, 668, 676, 684, 692, 700, 708, 716, 724, 732, 740, 748, 756, 764, 772, 780, 788, 796, 804, 812, 820, 828, 836, 844, 852, 860, 868, 876, 884, 892, 900, 908, 916, 924, 932, 940, 948, 956, 964, 972, 980, 988, 996, 1004, 1012, 1020, 1028, 1036, 1044, 1052, 1060, and 1068 or preferably any VH as disclosed together in the sequence table Tab. 52, preferably 433 and 92 for the first and the third binding domain, respectively, more preferably 433 for the first and 92 for the third binding domain or 1233+1235 and 1243+1245 (VH and CH1 in Fab) for the first and third binding domain, respectively, and wherein the first and/or third (target) binding domain comprises a VL region selected from SEQ ID NO: 84, 93, 102, 110, 118, 126, 134, 142, 150, 158, 166, 175, 184, 192, 201, 210, 219, 228, 237, 245, 341, 363, 372, 383, 392, 453, 461, 469, 477, 485, 493, 501, 509, 517, 525, 533, 541, 549, 557, 565, 573, 581, 589, 597, 605, 613, 621, 629, 637, 645, 653, 661, 669, 677, 685, 693, 701, 709, 717, 725, 733, 741, 749, 757, 765, 773, 781, 789, 797, 805, 813, 821, 829, 837, 845, 853, 861, 869, 877, 885, 893, 901, 909, 917, 925, 933, 941, 949, 957, 965, 973, 981, 989, 997, 1005, 1013, 1021, 1029, 1037, 1045, 1053, 1061, and 1069 or preferably any VL as disclosed together in the sequence table Tab. 52, preferably 200 and 93 for the first and the third binding domain, respectively, more preferably 200 for the first and 93 for the third binding domain or 1234+1236 and 1244+1246 (VL and CL in Fab) for the first and third binding domain, respectively.

42. (canceled)

43. The antigen-binding molecule of claim 1, wherein the first and/or third (target) binding domain comprises a VL region of increased stability by a single amino acid exchange (E to I), selected from SEQ ID NO: 85, 94, 193, 202, 211, 220, 229, 364, 384, 393, preferably 94 and 202.

44. The antigen-binding molecule of claim 1, wherein the antigen-binding molecule comprises a combination of amino acid sequences selected from the group consisting of; SEQ ID NOs: 1259 and 1251, 1247 and 1248, 1249 and 1250, 1254, 1255 and 1253, 1252, 1257, 1253 and 1256, and 1254, 1258, 1253 and 1256.

45-48. (canceled)

49. A pharmaceutical composition comprising the antigen-binding molecule of claim 1.

50. (canceled)

51. A method for treating or ameliorating a proliferative disease, a tumorous disease, a cancer, or an immunological disorder in a subject in need thereof, the method comprising administering to the subject an effective amount of a molecule comprising the antigen-binding molecule of claim 1.

52. The method of claim 51, wherein the cancer is acute myeloid leukemia (AML), Non-Hodgkin lymphoma (NHL), Non-small-cell lung carcinoma (NSCLC), pancreatic cancer, or Colorectal cancer (CRC).

53-58. (canceled)

The application's sequence listing, which the Patent Office published only in electronic form, follows.

SEQUENCE LISTING (1285 sequences)

SEQ ID NO: 1 - protein, 15 aa, Synthetic construct
GGGGQGGGGQGGGGQ

SEQ ID NO: 2 - protein, 50 aa, Synthetic construct
GGGGSGGGGSGGGGSGGGGSGGGGSGGGGSGGGGSGGGGSGGGGSGGGGS

SEQ ID NO: 3 - protein, 15 aa, Synthetic construct
GGGGSGGGGSGGGGS

SEQ ID NO: 4 - protein, 51 aa, Synthetic construct
GEAAAKEAAAKEAAAKEAAAKEAAAKEAAAKEAAAKEAAAKEAAAKEAAAK

SEQ ID NO: 5 - protein, 4 aa, Synthetic construct
GGGG

SEQ ID NO: 6 - protein, 5 aa, Synthetic construct
GGGGQ

SEQ ID NO: 7 - protein, 5 aa, Synthetic construct
GGGGS

SEQ ID NO: 8 - protein, 51 aa, Synthetic construct
SGGGGSGGGGSGGGGSGGGGSGGGGSGGGGSGGGGSGGGGSGGGGSGGGGS

SEQ ID NO: 9 - protein, 16 aa, Synthetic construct
SGGGGSGGGGSGGGGS

SEQ ID NO: 10 - protein, 52 aa, Synthetic construct
SGEAAAKEAAAKEAAAKEAAAKEAAAKEAAAKEAAAKEAAAKEAAAKEAAAK

SEQ ID NO: 11 - protein, 6 aa, Synthetic construct
SGGGGQ

SEQ ID NO: 12 - protein, 6 aa, Synthetic construct
SGGGGS

SEQ ID NO: 13 - protein, 50 aa, Synthetic construct
EAAAKEAAAKEAAAKEAAAKEAAAKEAAAKEAAAKEAAAKEAAAKEAAAK

SEQ ID NO: 14 - protein, 50 aa, Synthetic construct; identical to SEQ ID NO: 2

SEQ ID NO: 15 - protein, 585 aa, Synthetic construct [sequence omitted]

SEQ ID NO: 16 - protein, 143 aa, Synthetic construct
LDSPDRPWNPPTFSPALLVVTEGDNATFTCSFSNTSESFVLNWYRMSPSNQTDKLAAFPEDRSQPGQDCRFRVTQLPNGRDFHMSVVRARRNDSGTYLCGAISLAPKAQIKESLRAELRVTERRAEVPTAHPSPSPRPAGQFQ

SEQ ID NO: 17 - protein, 227 aa, Synthetic construct
DKTHTCPPCPAPELLGGPSVFLFPPKPKDTLMISRTPEVTCVVVDVSHEDPEVKFNWYVDGVEVHNAKTKPCEEQYGSTYRCVSVLTVLHQDWLNGKEYKCKVSNKALPAPIEKTISKAKGQPREPQVYTLPPSREEMTKNQVSLTCLVKGFYPSDIAVEWESNGQPENNYKTTPPVLDSDGSFFLYSKLTVDKSRWQQGNVFSCSVMHEALHNHYTQKSLSLSPGK

SEQ ID NO: 18 - protein, 225 aa, Synthetic construct
DKTHTCPPCPAPELLGGPSVFLFPPKPKDTLMISRTPEVTCVVVDVSHEDPEVKFNWYVDGVEVHNAKTKPCEEQYGSTYRCVSVLTVLHQDWLNGKEYKCKVSNKALPAPIEKTISKAKGQPREPQVYTLPPSREEMTKNQVSLTCLVKGFYPSDIAVEWESNGQPENNYKTTPPVLDSDGSFFLYSKLTVDKSRWQQGNVFSCSVMHEALHNHYTQKSLSLSP

SEQ ID NO: 19 - protein, 227 aa, Synthetic construct
DKTHTCPPCPAPELLGGPSVFLFPPKPKDTLMISRTPEVTCVVVDVSHEDPEVKFNWYVDGVEVHNAKTKPREEQYNSTYRVVSVLTVLHQDWLNGKEYKCKVSNKALPAPIEKTISKAKGQPREPQVYTLPPSREEMTKNQVSLTCLVKGFYPSDIAVEWESNGQPENNYKTTPPVLDSDGSFFLYSKLTVDKSRWQQGNVFSCSVMHEALHNHYTQKSLSLSPGK

SEQ ID NO: 20 - protein, 225 aa, Synthetic construct
DKTHTCPPCPAPELLGGPSVFLFPPKPKDTLMISRTPEVTCVVVDVSHEDPEVKFNWYVDGVEVHNAKTKPREEQYNSTYRVVSVLTVLHQDWLNGKEYKCKVSNKALPAPIEKTISKAKGQPREPQVYTLPPSREEMTKNQVSLTCLVKGFYPSDIAVEWESNGQPENNYKTTPPVLDSDGSFFLYSKLTVDKSRWQQGNVFSCSVMHEALHNHYTQKSLSLSP

SEQ ID NO: 21 - protein, 227 aa, Synthetic construct
DKTHTCPPCPAPELLGGPSVFLFPPKPKDTLMISRTPEVTCVVVDVSHEDPEVKFNWYVDGVEVHNAKTKPREEQYGSTYRVVSVLTVLHQDWLNGKEYKCKVSNKALPAPIEKTISKAKGQPREPQVYTLPPSREEMTKNQVSLTCLVKGFYPSDIAVEWESNGQPENNYKTTPPVLDSDGSFFLYSKLTVDKSRWQQGNVFSCSVMHEALHNHYTQKSLSLSPGK

SEQ ID NO: 22 - protein, 225 aa, Synthetic construct
DKTHTCPPCPAPELLGGPSVFLFPPKPKDTLMISRTPEVTCVVVDVSHEDPEVKFNWYVDGVEVHNAKTKPREEQYGSTYRVVSVLTVLHQDWLNGKEYKCKVSNKALPAPIEKTISKAKGQPREPQVYTLPPSREEMTKNQVSLTCLVKGFYPSDIAVEWESNGQPENNYKTTPPVLDSDGSFFLYSKLTVDKSRWQQGNVFSCSVMHEALHNHYTQKSLSLSP

SEQ ID NO: 23 - protein, 227 aa, Synthetic construct
DKTHTCPPCPAPELLGGPSVFLFPPKPKDTLMISRTPEVTCVVVDVSHEDPEVKFNWYVDGVEVHNAKTKPCEEQYNSTYRCVSVLTVLHQDWLNGKEYKCKVSNKALPAPIEKTISKAKGQPREPQVYTLPPSREEMTKNQVSLTCLVKGFYPSDIAVEWESNGQPENNYKTTPPVLDSDGSFFLYSKLTVDKSRWQQGNVFSCSVMHEALHNHYTQKSLSLSPGK

SEQ ID NO: 24 - protein, 225 aa, Synthetic construct
DKTHTCPPCPAPELLGGPSVFLFPPKPKDTLMISRTPEVTCVVVDVSHEDPEVKFNWYVDGVEVHNAKTKPCEEQYNSTYRCVSVLTVLHQDWLNGKEYKCKVSNKALPAPIEKTISKAKGQPREPQVYTLPPSREEMTKNQVSLTCLVKGFYPSDIAVEWESNGQPENNYKTTPPVLDSDGSFFLYSKLTVDKSRWQQGNVFSCSVMHEALHNHYTQKSLSLSP

SEQ ID NO: 25 - protein, 484 aa, Synthetic construct
DKTHTCPPCPAPELLGGPSVFLFPPKPKDTLMISRTPEVTCVVVDVSHEDPEVKFNWYVDGVEVHNAKTKPCEEQYGSTYRCVSVLTVLHQDWLNGKEYKCKVSNKALPAPIEKTISKAKGQPREPQVYTLPPSREEMTKNQVSLTCLVKGFYPSDIAVEWESNGQPENNYKTTPPVLDSDGSFFLYSKLTVDKSRWQQGNVFSCSVMHEALHNHYTQKSLSLSPGKGGGGSGGGGSGGGGSGGGGSGGGGSGGGGSDKTHTCPPCPAPELLGGPSVFLFPPKPKDTLMISRTPEVTCVVVDVSHEDPEVKFNWYVDGVEVHNAKTKPCEEQYGSTYRCVSVLTVLHQDWLNGKEYKCKVSNKALPAPIEKTISKAKGQPREPQVYTLPPSREEMTKNQVSLTCLVKGFYPSDIAVEWESNGQPENNYKTTPPVLDSDGSFFLYSKLTVDKSRWQQGNVFSCSVMHEALHNHYTQKSLSLSPGK

SEQ ID NO: 26 - protein, 480 aa, Synthetic construct
DKTHTCPPCPAPELLGGPSVFLFPPKPKDTLMISRTPEVTCVVVDVSHEDPEVKFNWYVDGVEVHNAKTKPCEEQYGSTYRCVSVLTVLHQDWLNGKEYKCKVSNKALPAPIEKTISKAKGQPREPQVYTLPPSREEMTKNQVSLTCLVKGFYPSDIAVEWESNGQPENNYKTTPPVLDSDGSFFLYSKLTVDKSRWQQGNVFSCSVMHEALHNHYTQKSLSLSPGGGGSGGGGSGGGGSGGGGSGGGGSGGGGSDKTHTCPPCPAPELLGGPSVFLFPPKPKDTLMISRTPEVTCVVVDVSHEDPEVKFNWYVDGVEVHNAKTKPCEEQYGSTYRCVSVLTVLHQDWLNGKEYKCKVSNKALPAPIEKTISKAKGQPREPQVYTLPPSREEMTKNQVSLTCLVKGFYPSDIAVEWESNGQPENNYKTTPPVLDSDGSFFLYSKLTVDKSRWQQGNVFSCSVMHEALHNHYTQKSLSLSP

SEQ ID NO: 27 - protein, 484 aa, Synthetic construct
DKTHTCPPCPAPELLGGPSVFLFPPKPKDTLMISRTPEVTCVVVDVSHEDPEVKFNWYVDGVEVHNAKTKPREEQYNSTYRVVSVLTVLHQDWLNGKEYKCKVSNKALPAPIEKTISKAKGQPREPQVYTLPPSREEMTKNQVSLTCLVKGFYPSDIAVEWESNGQPENNYKTTPPVLDSDGSFFLYSKLTVDKSRWQQGNVFSCSVMHEALHNHYTQKSLSLSPGKGGGGSGGGGSGGGGSGGGGSGGGGSGGGGSDKTHTCPPCPAPELLGGPSVFLFPPKPKDTLMISRTPEVTCVVVDVSHEDPEVKFNWYVDGVEVHNAKTKPREEQYNSTYRVVSVLTVLHQDWLNGKEYKCKVSNKALPAPIEKTISKAKGQPREPQVYTLPPSREEMTKNQVSLTCLVKGFYPSDIAVEWESNGQPENNYKTTPPVLDSDGSFFLYSKLTVDKSRWQQGNVFSCSVMHEALHNHYTQKSLSLSPGK

SEQ ID NO: 28 - protein, 480 aa, Synthetic construct
DKTHTCPPCPAPELLGGPSVFLFPPKPKDTLMISRTPEVTCVVVDVSHEDPEVKFNWYVDGVEVHNAKTKPREEQYNSTYRVVSVLTVLHQDWLNGKEYKCKVSNKALPAPIEKTISKAKGQPREPQVYTLPPSREEMTKNQVSLTCLVKGFYPSDIAVEWESNGQPENNYKTTPPVLDSDGSFFLYSKLTVDKSRWQQGNVFSCSVMHEALHNHYTQKSLSLSPGGGGSGGGGSGGGGSGGGGSGGGGSGGGGSDKTHTCPPCPAPELLGGPSVFLFPPKPKDTLMISRTPEVTCVVVDVSHEDPEVKFNWYVDGVEVHNAKTKPREEQYNSTYRVVSVLTVLHQDWLNGKEYKCKVSNKALPAPIEKTISKAKGQPREPQVYTLPPSREEMTKNQVSLTCLVKGFYPSDIAVEWESNGQPENNYKTTPPVLDSDGSFFLYSKLTVDKSRWQQGNVFSCSVMHEALHNHYTQKSLSLSP

SEQ ID NO: 29 - protein, 484 aa, Synthetic construct
DKTHTCPPCPAPELLGGPSVFLFPPKPKDTLMISRTPEVTCVVVDVSHEDPEVKFNWYVDGVEVHNAKTKPREEQYGSTYRVVSVLTVLHQDWLNGKEYKCKVSNKALPAPIEKTISKAKGQPREPQVYTLPPSREEMTKNQVSLTCLVKGFYPSDIAVEWESNGQPENNYKTTPPVLDSDGSFFLYSKLTVDKSRWQQGNVFSCSVMHEALHNHYTQKSLSLSPGKGGGGSGGGGSGGGGSGGGGSGGGGSGGGGSDKTHTCPPCPAPELLGGPSVFLFPPKPKDTLMISRTPEVTCVVVDVSHEDPEVKFNWYVDGVEVHNAKTKPREEQYGSTYRVVSVLTVLHQDWLNGKEYKCKVSNKALPAPIEKTISKAKGQPREPQVYTLPPSREEMTKNQVSLTCLVKGFYPSDIAVEWESNGQPENNYKTTPPVLDSDGSFFLYSKLTVDKSRWQQGNVFSCSVMHEALHNHYTQKSLSLSPGK

SEQ ID NO: 30 - protein, 480 aa, Synthetic construct
DKTHTCPPCPAPELLGGPSVFLFPPKPKDTLMISRTPEVTCVVVDVSHEDPEVKFNWYVDGVEVHNAKTKPREEQYGSTYRVVSVLTVLHQDWLNGKEYKCKVSNKALPAPIEKTISKAKGQPREPQVYTLPPSREEMTKNQVSLTCLVKGFYPSDIAVEWESNGQPENNYKTTPPVLDSDGSFFLYSKLTVDKSRWQQGNVFSCSVMHEALHNHYTQKSLSLSPGGGGSGGGGSGGGGSGGGGSGGGGSGGGGSDKTHTCPPCPAPELLGGPSVFLFPPKPKDTLMISRTPEVTCVVVDVSHEDPEVKFNWYVDGVEVHNAKTKPREEQYGSTYRVVSVLTVLHQDWLNGKEYKCKVSNKALPAPIEKTISKAKGQPREPQVYTLPPSREEMTKNQVSLTCLVKGFYPSDIAVEWESNGQPENNYKTTPPVLDSDGSFFLYSKLTVDKSRWQQGNVFSCSVMHEALHNHYTQKSLSLSP

SEQ ID NO: 31 - protein, 484 aa, Synthetic construct
DKTHTCPPCPAPELLGGPSVFLFPPKPKDTLMISRTPEVTCVVVDVSHEDPEVKFNWYVDGVEVHNAKTKPCEEQYNSTYRCVSVLTVLHQDWLNGKEYKCKVSNKALPAPIEKTISKAKGQPREPQVYTLPPSREEMTKNQVSLTCLVKGFYPSDIAVEWESNGQPENNYKTTPPVLDSDGSFFLYSKLTVDKSRWQQGNVFSCSVMHEALHNHYTQKSLSLSPGKGGGGSGGGGSGGGGSGGGGSGGGGSGGGGSDKTHTCPPCPAPELLGGPSVFLFPPKPKDTLMISRTPEVTCVVVDVSHEDPEVKFNWYVDGVEVHNAKTKPCEEQYNSTYRCVSVLTVLHQDWLNGKEYKCKVSNKALPAPIEKTISKAKGQPREPQVYTLPPSREEMTKNQVSLTCLVKGFYPSDIAVEWESNGQPENNYKTTPPVLDSDGSFFLYSKLTVDKSRWQQGNVFSCSVMHEALHNHYTQKSLSLSPGK

SEQ ID NO: 32 - protein, 480 aa, Synthetic construct
DKTHTCPPCPAPELLGGPSVFLFPPKPKDTLMISRTPEVTCVVVDVSHEDPEVKFNWYVDGVEVHNAKTKPCEEQYNSTYRCVSVLTVLHQDWLNGKEYKCKVSNKALPAPIEKTISKAKGQPREPQVYTLPPSREEMTKNQVSLTCLVKGFYPSDIAVEWESNGQPENNYKTTPPVLDSDGSFFLYSKLTVDKSRWQQGNVFSCSVMHEALHNHYTQKSLSLSPGGGGSGGGGSGGGGSGGGGSGGGGSGGGGSDKTHTCPPCPAPELLGGPSVFLFPPKPKDTLMISRTPEVTCVVVDVSHEDPEVKFNWYVDGVEVHNAKTKPCEEQYNSTYRCVSVLTVLHQDWLNGKEYKCKVSNKALPAPIEKTISKAKGQPREPQVYTLPPSREEMTKNQVSLTCLVKGFYPSDIAVEWESNGQPENNYKTTPPVLDSDGSFFLYSKLTVDKSRWQQGNVFSCSVMHEALHNHYTQKSLSLSP

SEQ ID NO: 33 - protein, 474 aa, Synthetic construct
CPPCPAPELLGGPSVFLFPPKPKDTLMISRTPEVTCVVVDVSHEEPEVKFNWYVDGVEVHNAKTKPCEEQYGSTYRCVSVLTVLHQDWLNGKEYKCKVSNKALPAPIEKTISKAKGQPREPQVYTLPPSREEMTKNQVSLTCLVKGFYPSDIAVEWESNGQPENNYKTTPPVLDSDGSFFLYSKLTVDKSRWQQGNVFSCSVMHEALHNHYTQKSLSLSPGKGGGGQGGGGQGGGGQGGGGQGGGGQGGGGQCPPCPAPELLGGPSVFLFPPKPKDTLMISRTPEVTCVVVDVSHEEPEVKFNWYVDGVEVHNAKTKPCEEQYGSTYRCVSVLTVLHQDWLNGKEYKCKVSNKALPAPIEKTISKAKGQPREPQVYTLPPSREEMTKNQVSLTCLVKGFYPSDIAVEWESNGQPENNYKTTPPVLDSDGSFFLYSKLTVDKSRWQQGNVFSCSVMHEALHNHYTQKSLSLSPGK

SEQ ID NO: 34 - protein, 968 aa, Synthetic construct
DKTHTCPPCPAPELLGGPSVFLFPPKPKDTLMISRTPEVTCVVVDVSHEDPEVKFNWYVDGVEVHNAKTKPCEEQYGSTYRCVSVLTVLHQDWLNGKEYKCKVSNKALPAPIEKTISKAKGQPREPQVYTLPPSREEMTKNQVSLTCLVKGFYPSDIAVEWESNGQPENNYKTTPPVLDSDGSFFLYSKLTVDKSRWQQGNVFSCSVMHEALHNHYTQKSLSLSPGKGGGGSGGGGSGGGGSGGGGSGGGGSGGGGSDKTHTCPPCPAPELLGGPSVFLFPPKPKDTLMISRTPEVTCVVVDVSHEDPEVKFNWYVDGVEVHNAKTKPCEEQYGSTYRCVSVLTVLHQDWLNGKEYKCKVSNKALPAPIEKTISKAKGQPREPQVYTLPPSREEMTKNQVSLTCLVKGFYPSDIAVEWESNGQPENNYKTTPPVLDSDGSFFLYSKLTVDKSRWQQGNVFSCSVMHEALHNHYTQKSLSLSPGKDKTHTCPPCPAPELLGGPSVFLFPPKPKDTLMISRTPEVTCVVVDVSHEDPEVKFNWYVDGVEVHNAKTKPCEEQYGSTYRCVSVLTVLHQDWLNGKEYKCKVSNKALPAPIEKTISKAKGQPREPQVYTLPPSREEMTKNQVSLTCLVKGFYPSDIAVEWESNGQPENNYKTTPPVLDSDGSFFLYSKLTVDKSRWQQGNVFSCSVMHEALHNHYTQKSLSLSPGKGGGGSGGGGSGGGGSGGGGSGGGGSGGGGSDKTHTCPPCPAPELLGGPSVFLFPPKPKDTLMISRTPEVTCVVVDVSHEDPEVKFNWYVDGVEVHNAKTKPCEEQYGSTYRCVSVLTVLHQDWLNGKEYKCKVSNKALPAPIEKTISKAKGQPREPQVYTLPPSREEMTKNQVSLTCLVKGFYPSDIAVEWESNGQPENNYKTTPPVLDSDGSFFLYSKLTVDKSRWQQGNVFSCSVMHEALHNHYTQKSLSLSPGK

SEQ ID NO: 35 - protein, 227 aa, Synthetic construct
DKTHTCPPCPAPELLGGPSVFLFPPKPKDTLMISRTPEVTCVVVDVSHEDPEVKFNWYVDGVEVHNAKTKPCEEQYGSTYRCVSVLTVLHQDWLNGKEYKCKVSNKALPAPIEKTISKAKGQPREPQVYTLPPSREEMTKNQVSLTCLVKGFYPSDIAVEWESNGQPENNYDTTPPVLDSDGSFFLYSDLTVDKSRWQQGNVFSCSVMHEALHNHYTQDSLSLSPGK

SEQ ID NO: 36 - protein, 227 aa, Synthetic construct
DKTHTCPPCPAPELLGGPSVFLFPPKPKDTLMISRTPEVTCVVVDVSHEDPEVKFNWYVDGVEVHNAKTKPCEEQYGSTYRCVSVLTVLHQDWLNGKEYKCKVSNKALPAPIEKTISKAKGQPREPQVYTLPPSRKEMTKNQVSLTCLVKGFYPSDIAVEWESNGQPENNYKTTPPVLKSDGSFFLYSKLTVDKSRWQQGNVFSCSVMHEALHNHYTQKSLSLSPGK

SEQ ID NO: 37 - protein, 5 aa, Synthetic construct
KYAMN

SEQ ID NO: 38 - protein, 19 aa, Synthetic construct
RIRSKYNNYATYYADSVKD

SEQ ID NO: 39 - protein, 14 aa, Synthetic construct
HGNFGNSYISYWAY

SEQ ID NO: 40 - protein, 14 aa, Synthetic construct
GSSTGAVTSGNYPN

SEQ ID NO: 41 - protein, 7 aa, Synthetic construct
GTKFLAP

SEQ ID NO: 42 - protein, 9 aa, Synthetic construct
VLWYSNRWV

SEQ ID NO: 43 - protein, 125 aa, Synthetic construct
EVQLVESGGGLVQPGGSLKLSCAASGFTFNKYAMNWVRQAPGKGLEWVARIRSKYNNYATYYADSVKDRFTISRDDSKNTAYLQMNNLKTEDTAVYYCVRHGNFGNSYISYWAYWGQGTLVTVSS

SEQ ID NO: 44 - protein, 109 aa, Synthetic construct
QTVVTQEPSLTVSPGGTVTLTCGSSTGAVTSGNYPNWVQQKPGQAPRGLIGGTKFLAPGTPARFSGSLLGGKAALTLSGVQPEDEAEYYCVLWYSNRWVFGGGTKLTVL

SEQ ID NO: 45 - protein, 5 aa, Synthetic construct
KYAMN

SEQ ID NO: 46 - protein, 19 aa, Synthetic construct
RIRSKYNNYATYYADSVKD

SEQ ID NO: 47 - protein, 14 aa, Synthetic construct
HGNFGNSYISYWAY

SEQ ID NO: 48 - protein, 14 aa, Synthetic construct
GSSTGAVTSGNYPN

SEQ ID NO: 49 - protein, 7 aa, Synthetic construct
GTKFLAP

SEQ ID NO: 50 - protein, 9 aa, Synthetic construct
VLWYSNRWV

SEQ ID NO: 51 - protein, 125 aa, Synthetic construct
EVQLVESGGGLVQPGGSLKLSCAASGFTFNKYAMNWVRQAPGKCLEWVARIRSKYNNYATYYADSVKDRFTISRDDSKNTAYLQMNNLKTEDTAVYYCVRHGNFGNSYISYWAYWGQGTLVTVSS

SEQ ID NO: 52 - protein, 109 aa, Synthetic construct
QTVVTQEPSLTVSPGGTVTLTCGSSTGAVTSGNYPNWVQQKPGQAPRGLIGGTKFLAPGTPARFSGSLLGGKAALTLSGVQPEDEAEYYCVLWYSNRWVFGCGTKLTVL

SEQ ID NO: 53 - protein, 5 aa, Synthetic construct
KYAIN

SEQ ID NO: 54 - protein, 19 aa, Synthetic construct
RIRSKYNNYATYYADAVKD

SEQ ID NO: 55 - protein, 14 aa, Synthetic construct
AGNFGSSYISYWAY

SEQ ID NO: 56 - protein, 14 aa, Synthetic construct
GSSTGAVTSGNYPN

SEQ ID NO: 57 - protein, 7 aa, Synthetic construct
GTKFLAP

SEQ ID NO: 58 - protein, 9 aa, Synthetic construct
VLWYSNRWV

SEQ ID NO: 59 - protein, 125 aa, Synthetic construct
EVQLVESGGGLVQPGGSLKLSCAASGFTFNKYAINWVRQAPGKGLEWVARIRSKYNNYATYYADAVKDRFTISRDDSKNTVYLQMNNLKTEDTAVYYCARAGNFGSSYISYWAYWGQGTLVTVSS

SEQ ID NO: 60 - protein, 109 aa, Synthetic construct
QTVVTQEPSLTVSPGGTVTITCGSSTGAVTSGNYPNWVQKKPGQAPRGLIGGTKFLAPGTPARFSGSLSGGKAALTLSGVQPEDEAEYYCVLWYSNRWVFGSGTKLTVL

SEQ ID NO: 61 - protein, 5 aa, Synthetic construct
KYAMN

SEQ ID NO: 62 - protein, 19 aa, Synthetic construct
RIRSKYNNYATYYADAVKD

SEQ ID NO: 63 - protein, 14 aa, Synthetic construct
AGNFGSSYISYFAY

SEQ ID NO: 64 - protein, 14 aa, Synthetic construct
GSSTGAVTSGNYPN

SEQ ID NO: 65 - protein, 7 aa, Synthetic construct
GTKFLAP

SEQ ID NO: 66 - protein, 9 aa, Synthetic construct
VLYYSNRWV

SEQ ID NO: 67 - protein, 125 aa, Synthetic construct
EVQLVESGGGLVQPGGSLKLSCAASGFTFNKYAMNWVRQAPGKGMEWVARIRSKYNNYATYYADAVKDRFTISRDDSKNTLYLQMNNLKTEDTAVYYCVRAGNFGSSYISYFAYWGQGTLVTVSS

SEQ ID NO: 68 - protein, 109 aa, Synthetic construct
QTVVTQEPSLTVSPGGTVTITCGSSTGAVTSGNYPNWIQKKPGQAPRGLIGGTKFLAPGTPARFSGSLEGGKAALTLSGVQPEDEAEYYCVLYYSNRWVFGSGTKLTVL

SEQ ID NO: 69 - protein, 5 aa, Synthetic construct
KYAIN

SEQ ID NO: 70 - protein, 19 aa, Synthetic construct
RIRSKYNNYATYYADAVKD

SEQ ID NO: 71 - protein, 14 aa, Synthetic construct
NANFGTSYISYFAY

SEQ ID NO: 72 - protein, 14 aa, Synthetic construct
GSSTGAVTSGNYPN

SEQ ID NO: 73 - protein, 7 aa, Synthetic construct
GTKFLAP

SEQ ID NO: 74 - protein, 9 aa, Synthetic construct
VLWYSNRWV

SEQ ID NO: 75 - protein, 125 aa, Synthetic construct
EVQLVESGGGLVQPGGSLKLSCAASGFTFNKYAINWVREAPGKGLEWVARIRSKYNNYATYYADAVKDRFTISRDDSKNTAYLQMNNLKTEDTAVYYCVRNANFGTSYISYFAYWGQGTLVTVSS

SEQ ID NO: 76 - protein, 109 aa, Synthetic construct
QTVVTQEPSLTVSPGGTVTLTCGSSTGAVTSGNYPNWVQKKPGQAPRGLIGGTKFLAPGTPARFSGSLLGGKAALTLSGVQPEDEAEYYCVLWYSNRWVFGSGTKLTVL

SEQ ID NO: 77 - protein, 5 aa, Synthetic construct
DYYMT

SEQ ID NO: 78 - protein, 17 aa, Synthetic construct
YISSSGSTIYYAEAVKG

SEQ ID NO: 79 - protein, 8 aa, Synthetic construct
DRNSHFDY

SEQ ID NO: 80 - protein, 11 aa, Synthetic construct
RASQGIRTWLA

SEQ ID NO: 81 - protein, 7 aa, Synthetic construct
GASGLQS

SEQ ID NO: 82 - protein, 9 aa, Synthetic construct
QQAESFPRT

SEQ ID NO: 83 - protein, 117 aa, Synthetic construct
QVQLVESGGGLVKPGGSLRLSCAASGFTFSDYYMTWIRQAPGKCLEWLSYISSSGSTIYYAEAVKGRFTISRDNAKNSLFLQMNSLRAEDTAVYYCARDRNSHFDYWGQGTLVTVSS

SEQ ID NO: 84 - protein, 106 aa, Synthetic construct
DIMTQSPSSVSASVGDRVTITCRASQGIRTWLAWYQQKPGKAPKLLIYGASGLQSGVPSRFSGSGSGTDFTLTISSLQPEDFATYYCQQAESFPRTFGCGTKVEIK

SEQ ID NO: 85 - protein, 106 aa, Synthetic construct
EIMTQSPSSVSASVGDRVTITCRASQGIRTWLAWYQQKPGKAPKLLIYGASGLQSGVPSRFSGSGSGTDFTLTISSLQPEDFATYYCQQAESFPRTFGCGTKVEIK

SEQ ID NO: 86 - protein, 7 aa, Synthetic construct
SSSYFWG

SEQ ID NO: 87 - protein, 16 aa, Synthetic construct
NIYYSGSSNYNPSLKS

SEQ ID NO: 88 - protein, 11 aa, Synthetic construct
LPRGDRDAFDI

SEQ ID NO: 89 - protein, 11 aa, Synthetic construct
RASQGISNYLA

SEQ ID NO: 90 - protein, 7 aa, Synthetic construct
AASTLQS

SEQ ID NO: 91 - protein, 9 aa, Synthetic construct
QQSYSTPFT

SEQ ID NO: 92 - protein, 121 aa, Synthetic construct
QVQLQESGPGLVKPSETLSLTCTVSGGSISSSSYFWGWIRQPPGKCLEWIGNIYYSGSSNYNPSLKSRVTISVDTSKNQFSLKLSSVTAADTAVYYCARLPRGDRDAFDIWGQGTMVTVSS

SEQ ID NO: 93 - protein, 107 aa, Synthetic construct
DIVMTQSPSSLSASVGDRVTITCRASQGISNYLAWYQQKPGKVPKLLIYAASTLQSGVPSRFSGSGSGTDFTLTISSLQPEDFATYYCQQSYSTPFTFGCGTKVEIK

SEQ ID NO: 94 - protein, 107 aa, Synthetic construct
EIVMTQSPSSLSASVGDRVTITCRASQGISNYLAWYQQKPGKVPKLLIYAASTLQSGVPSRFSGSGSGTDFTLTISSLQPEDFATYYCQQSYSTPFTFGCGTKVEIK

SEQ ID NO: 95 - protein, 7 aa, Synthetic construct
SSSYFWV

SEQ ID NO: 96 - protein, 16 aa, Synthetic construct
SIYYSGSTYYNPSLKS

SEQ ID NO: 97 - protein, 11 aa, Synthetic construct
LPRGDRMTFDI

SEQ ID NO: 98 - protein, 12 aa, Synthetic construct
RASQSVSSSYLA

SEQ ID NO: 99 - protein, 7 aa, Synthetic construct
GASSRAT

SEQ ID NO: 100 - protein, 9 aa, Synthetic construct
QQYGSSPFT

SEQ ID NO: 101 - protein, 121 aa, Synthetic construct
QVQLQESGPGLVKPSETLSLTCTVSGGSISSSSYFWVWIRQPPGKCLEWIGSIYYSGSTYYNPSLKSRVTISVDTSKNQFSLKLNSVTAADTAVYYCARLPRGDRMTFDIWGQGTMVTVSS

SEQ ID NO: 102 - protein, 108 aa, Synthetic construct
EIVLTQSPGTLSLSPGERATLSCRASQSVSSSYLAWYQQKPGQAPRLLIYGASSRATGIPDRFSGSGSGTDFTLTISRLEPEDFAVYYCQQYGSSPFTFGCGTKLEIK

SEQ ID NO: 103 - protein, 5 aa, Synthetic construct
SYAMS

SEQ ID NO: 104 - protein, 17 aa, Synthetic construct
AISGSGEQWYYAPSVKG

SEQ ID NO: 105 - protein, 12 aa, Synthetic construct
VRNYYGSGSLDY

SEQ ID NO: 106 - protein, 12 aa, Synthetic construct
RASQSFSSAYLA

SEQ ID NO: 107 - protein, 7 aa, Synthetic construct
GASIRAT

SEQ ID NO: 108 - protein, 8 aa, Synthetic construct
QQYGSSLT

SEQ ID NO: 109 - protein, 121 aa, Synthetic construct
EVQLLESGGGVVQPGRSLRLSCAASGFTFSSYAMSWVRQAPGKCLEWVSAISGSGEQWYYAPSVKGRFTISRDNSKNTLYLQMNSLRAEDTAVYYCAKVRNYYGSGSLDYWGQGTLVTVSS

SEQ ID NO: 110 - protein, 107 aa, Synthetic construct
EIVLTQSPGTLSLSPGERATLSCRASQSFSSAYLAWYQQKPGQAPRLLIYGASIRATGIPDRFSGSGSGTDFTLTISRLEPEDFAVYYCQQYGSSLTFGCGTKVEIK

SEQ ID NO: 111 - protein, 5 aa, Synthetic construct
SYAMS

SEQ ID NO: 112 - protein, 17 aa, Synthetic construct
AISGSGEGDYYANSVKG

SEQ ID NO: 113 - protein, 12 aa, Synthetic construct
VRNYYGSGSLDY

SEQ ID NO: 114 - protein, 12 aa, Synthetic construct
RASQSVSSTYLA

SEQ ID NO: 115 - protein, 7 aa, Synthetic construct
GASIRAT

SEQ ID NO: 116 - protein, 8 aa, Synthetic construct
QQYGSSLT

SEQ ID NO: 117 - protein, 121 aa, Synthetic construct
EVQLLESGGGVVQPGRSLRLSCAASGFTFSSYAMSWVRQAPGMCLEWVSAISGSGEGDYYANSVKGRFTISRDNSKNTLYLQMNSLRAEDTAVYYCAKVRNYYGSGSLDYWGQGTLVTVSS

SEQ ID NO: 118 - protein, 107 aa, Synthetic construct
EIVLTQSPGTLSLSPGERATLSCRASQSVSSTYLAWYQQKPGQAPRLLIYGASIRATGIPDRFSGSGSGTDFTLTISRLEPEDFAVYYCQQYGSSLTFGCGTKVEIK

SEQ ID NO: 119 - protein, 5 aa, Synthetic construct
SYAMS

SEQ ID NO: 120 - protein, 17 aa, Synthetic construct
AISGSGGSTYYAIDVKG

SEQ ID NO: 121 - protein, 19 aa, Synthetic construct
EGYYPGSGYPLYYYFGMDV

SEQ ID NO: 122 - protein, 12 aa, Synthetic construct
RASQSVSSSYLA

SEQ ID NO: 123 - protein, 7 aa, Synthetic construct
GASSRAT

SEQ ID NO: 124 - protein, 10 aa, Synthetic construct
QQYGSSPIFT

SEQ ID NO: 125 - protein, 128 aa, Synthetic construct
EVQLLESGGGLVQPGGSLRLSCAASGFTFSSYAMSWVRQAPGKCLEWVSAISGSGGSTYYAIDVKGRFTISRDNSKNTLYLQMNSLRAEDTAVYYCAKEGYYPGSGYPLYYYFGMDVWGQGTTVTVSS

SEQ ID NO: 126 - protein, 109 aa, Synthetic construct
EIVLTQSPGTLSLSPGERATLSCRASQSVSSSYLAWYQQKPGQAPRLLIYGASSRATGIPDRFSGSGSGTDFTLTISRLEPEDFAVYYCQQYGSSPIFTFGCGTKVEIK

SEQ ID NO: 127 - protein, 5 aa, Synthetic construct
SYGMG

SEQ ID NO: 128 - protein, 17 aa, Synthetic construct
VISYHGSNKYYADAVKG

SEQ ID NO: 129 - protein, 21 aa, Synthetic construct
EGAHFGSGSYYPLYYYYAMDV

SEQ ID NO: 130 - protein, 12 aa, Synthetic construct
RASQSVSSSYLA

SEQ ID NO: 131 - protein, 7 aa, Synthetic construct
GASIRAT

SEQ ID NO: 132 - protein, 10 aa, Synthetic construct
QQTGSSPIFT

SEQ ID NO: 133 - protein, 130 aa, Synthetic construct
QVQLVESGGGVVQPGRSLRLSCAASGFTFSSYGMGWVRQAPGKCLEWVAVISYHGSNKYYADAVKGRFTISRDNSKNTLYLQMNSLRAEDTAVYYCAREGAHFGSGSYYPLYYYYAMDVWGQGTTVTVSS

SEQ ID NO: 134 - protein, 108 aa, Synthetic construct
EIVTQSPGTLSLSPGERATLSCRASQSVSSSYLAWYQQKPGQAPRLLIYGASIRATGIPDRFSGSGSGTDFTLTISRLEPEDFAVYYCQQTGSSPIFTFGCGTKVEIK

SEQ ID NO: 135 - protein, 5 aa, Synthetic construct
SYAMS

SEQ ID NO: 136 - protein, 17 aa, Synthetic construct
AISGSGEFSYYAAAVKG

SEQ ID NO: 137 - protein, 12 aa, Synthetic construct
VRNYYGSGSLDY

SEQ ID NO: 138 - protein, 12 aa, Synthetic construct
RASQSVSSTYLA

SEQ ID NO: 139 - protein, 7 aa, Synthetic construct
GASIRAT

SEQ ID NO: 140 - protein, 8 aa, Synthetic construct
QQYQSSLT

SEQ ID NO: 141 - protein, 121 aa, Synthetic construct
EVQLLESGGGVVQPGRSLRLSCAASGFTFSSYAMSWVRQAPGKCLEWVSAISGSGEFSYYAAAVKGRFTISRDNSKNTLYLQMNSLRAEDTAVYYCAKVRNYYGSGSLDYWGQGTLVTVSS

SEQ ID NO: 142 - protein, 107 aa, Synthetic construct
EIVLTQSPGTLSLSPGERATLSCRASQSVSSTYLAWYQQKPGQAPRLLIYGASIRATGIPDRFSGSGSGTDFTLTISRLEPEDFAVYYCQQYQSSLTFGCGTKVEIK

SEQ ID NO: 143 - protein, 5 aa, Synthetic construct
GYYIH

SEQ ID NO: 144 - protein, 17 aa, Synthetic construct
WINPNSGGTNYAQKFQG

SEQ ID NO: 145 - protein, 17 aa, Synthetic construct
VEAVAGREYYYFSGMDV

SEQ ID NO: 146 - protein, 11 aa, Synthetic construct
SGEKLGDKYVY

SEQ ID NO: 147 - protein, 7 aa, Synthetic construct
QSTKRPS

SEQ ID NO: 148 - protein, 9 aa, Synthetic construct
QAYHASTAV

SEQ ID NO: 149 - protein, 126 aa, Synthetic construct
QVQLVQSGAEVKKPGASVKVSCKASGYTFTGYYIHWVRQAPGQCLEWMGWINPNSGGTNYAQKFQGRVTMTRDTSISTAYMELSRLRSDDTAVYYCARVEAVAGREYYYFSGMDVWGQGTTVTVSS

SEQ ID NO: 150 - protein, 106 aa, Synthetic construct
SYELTQPPSVSVSPGQTASITCSGEKLGDKYVYWYQQKPGQSPVLVIYQSTKRPSGVPERFSGSNSGNTATLTISGTQAMDEADYYCQAYHASTAVFGCGTKLTVL

SEQ ID NO: 151 - protein, 5 aa, Synthetic construct
SYGMG

SEQ ID NO: 152 - protein, 17 aa, Synthetic construct
VISYDGSNKYYADSVKG

SEQ ID NO: 153 - protein, 21 aa, Synthetic construct
EGAHFGSGSYYPLYYYYAMDV

SEQ ID NO: 154 - protein, 12 aa, Synthetic construct
RASQSVSSSYLA

SEQ ID NO: 155 - protein, 7 aa, Synthetic construct
GASIRAT

SEQ ID NO: 156 - protein, 10 aa, Synthetic construct
QQYGSSPIFT

SEQ ID NO: 157 - protein, 130 aa, Synthetic construct
EVQLLESGGGVVQPGRSLRLSCAASGFTFSSYGMGWVRQAPGKGLEWVAVISYDGSNKYYADSVKGRFTISRDNSKNTLYLQMNSLRAEDTAVYYCAREGAHFGSGSYYPLYYYYAMDVWGQGTTVTVSS

SEQ ID NO: 158 - protein, 109 aa, Synthetic construct
ELTLTQSPGTLSLSPGERATLSCRASQSVSSSYLAWYQQKPGQAPRLLIYGASIRATGIPDRFSGSGSGTDFTLTISRLEPEDFAVYYCQQYGSSPIFTFGPGTKVEIK

SEQ ID NO: 159 - protein, 5 aa, Synthetic construct
SYPIN

SEQ ID NO: 160 - protein, 16 aa, Synthetic construct
VIWTGGGTNYASSVKG

SEQ ID NO: 161 - protein, 15 aa, Synthetic construct
SRGVYDFKGRGAMDY

SEQ ID NO: 162 - protein, 17 aa, Synthetic construct
KSSQSLLYSSNQKNYFA

SEQ ID NO: 163 - protein, 7 aa, Synthetic construct
WASTRES

SEQ ID NO: 164 - protein, 9 aa, Synthetic construct
QQYYSYPYT

SEQ ID NO: 165 - protein, 123 aa, Synthetic construct
EVQLLESGGGLVQPGGSLRLSCAASGFSFSSYPINWVRQAPGKCLEWVGVIWTGGGTNYASSVKGRFTISRDNSKNTVYLQMNSLRAEDTAVYYCAKSRGVYDFKGRGAMDYWGQGTLVTVSS

SEQ ID NO: 166 - protein, 113 aa, Synthetic construct
DIVMTQSPDSLAVSLGERATINCKSSQSLLYSSNQKNYFAWYQQKPGQPPKLLIYWASTRESGVPDRFSGSGSGTDFTLTISSLQAEDVAVYYCQQYYSYPYTFGCGTKLEIK

SEQ ID NO: 167 - protein, 113 aa, Synthetic construct
EIVMTQSPDSLAVSLGERATINCKSSQSLLYSSNQKNYFAWYQQKPGQPPKLLIYWASTRESGVPDRFSGSGSGTDFTLTISSLQAEDVAVYYCQQYYSYPYTFGCGTKLEIK

SEQ ID NO: 168 - protein, 5 aa, Synthetic construct
SYWMH

SEQ ID NO: 169 - protein, 17 aa, Synthetic construct
VISGSKSYTIYNQKVKG

SEQ ID NO: 170 - protein, 8 aa, Synthetic construct
SGPGYFDV

SEQ ID NO: 171 - protein, 11 aa, Synthetic construct
RASENIYSYLA

SEQ ID NO: 172 - protein, 7 aa, Synthetic construct
NAKTLAE

SEQ ID NO: 173 - protein, 9 aa, Synthetic construct
QHLNMTPYT

SEQ ID NO: 174 - protein, 117 aa, Synthetic construct
EVQLLESGGGLVQPGGSLRLSCAASGYTFSSYWMHWVRQAPGKCLEWMGVISGSKSYTIYNQKVKGRFTISRDNSKNTVYLQMNSLRAGDTAVYYCARSGPGYFDVWGQGTMVTVSS

SEQ ID NO: 175 - protein, 107 aa, Synthetic construct
DIQLTQSPSFLSASVGDRVTITCRASENIYSYLAWYQQKPGKAPKLLIYNAKTLAEGVPSRFSGSGSGTEFTLTISSLQPEDFGTYYCQHLNMTPYTFGCGTKLEIK

SEQ ID NO: 176 - protein, 107 aa, Synthetic construct
EIQLTQSPSFLSASVGDRVTITCRASENIYSYLAWYQQKPGKAPKLLIYNAKTLAEGVPSRFSGSGSGTEFTLTISSLQPEDFGTYYCQHLNMTPYTFGCGTKLEIK

SEQ ID NO: 177 - protein, 5 aa, Synthetic construct
SYWMH

SEQ ID NO: 178 - protein, 17 aa, Synthetic construct
KIDPSDDYTNYNQKVKG

SEQ ID NO: 179 - protein, 8 aa, Synthetic construct
WDYNYFDV

SEQ ID NO: 180 - protein, 10 aa, Synthetic construct
RASSSVSYMH

SEQ ID NO: 181 - protein, 7 aa, Synthetic construct
GTSNLVS

SEQ ID NO: 182 - protein, 9 aa, Synthetic construct
QQWSSYPLT

SEQ ID NO: 183 - protein, 117 aa, Synthetic construct
EVQLLESGGGLVQPGGSLRLSCAASGFTFSSYWMHWVRQTPGKCLEWVSKIDPSDDYTNYNQKVKGRFTISIDKSKNTLYLQMNSLRAEDTAVYYCARWDYNYFDVWGQGTTVTVSS

SEQ ID NO: 184 - protein, 106 aa, Synthetic construct
EIVMTQSPATLSVSPGERATLTCRASSSVSYMHWYQQKPGQAPRLLIYGTSNLVSGVPARFSGSGSGTEFTLTISSLQSEDFAVYYCQQWSSYPLTFGCGTKVEIK

SEQ ID NO: 185 - protein, 5 aa, Synthetic construct
SYWMH

SEQ ID NO: 186 - protein, 17 aa, Synthetic construct
VIYTSGSYTIYNQKFQG

SEQ ID NO: 187 - protein, 8 aa, Synthetic construct
SGPGYFDV

SEQ ID NO: 188 - protein, 11 aa, Synthetic construct
RASGNIHNYLA

SEQ ID NO: 189 - protein, 7 aa, Synthetic construct
NAKTLAE

SEQ ID NO: 190 - protein, 9 aa, Synthetic construct
QHFAWTPYT

SEQ ID NO: 191 - protein, 117 aa, Synthetic construct
QVQLVQSGAEVKKPGASVKVSCKASGYTFTSYWMHWVRQAPGQCLEWMGVIYTSGSYTIYNQKFQGRVTMTRDTSTSTAYMELSSLRSEDTAVYYCARSGPGYFDVWGQGTMVTVSS

SEQ ID NO: 192 - protein, 107 aa, Synthetic construct
DIQLTQSPSFLSASVGDRVTITCRASGNIHNYLAWYQQKPGKAPKLLIYNAKTLAEGVPSRFSGSGSGTEFTLKISSLQPEDFATYYCQHFAWTPYTFGCGTKLEIK

SEQ ID NO: 193 - protein, 107 aa, Synthetic construct
EIQLTQSPSFLSASVGDRVTITCRASGNIHNYLAWYQQKPGKAPKLLIYNAKTLAEGVPSRFSGSGSGTEFTLKISSLQPEDFATYYCQHFAWTPYTFGCGTKLEIK

SEQ ID NO: 194 - protein, 5 aa, Synthetic construct
NYWMN

SEQ ID NO: 195 - protein, 17 aa, Synthetic construct
NIAYGVKGTNYNQKFQG

SEQ ID NO: 196 - protein, 8 aa, Synthetic construct
RYFYVMDY

SEQ ID NO: 197 - protein, 11 aa, Synthetic construct
RASQDISNYLN

SEQ ID NO: 198 - protein, 7 aa, Synthetic construct
YTSRLHS

SEQ ID NO: 199 - protein, 9 aa, Synthetic construct
VQYAQFPLT

SEQ ID NO: 200 - protein, 117 aa, Synthetic construct
QVQLVQSGAEVKKPGASVKVSCKASGYTFTNYWMNWVRQAPGQCLEWMGNIAYGVKGTNYNQKFQGRVTMTVDTSSSTAYMELSRLRSDDTAVYYCATRYFYVMDYWGQGTLVTVSS

SEQ ID NO: 201 - protein, 107 aa, Synthetic construct
DIQMTQSPSSLSASVGDRVTITCRASQDISNYLNWYQQKPGKVPKLLIYYTSRLHSGVPSRFSGSGSGTDFTLTISSLQPEDVATYYCVQYAQFPLTFGCGTKVEIK

SEQ ID NO: 202 - protein, 107 aa, Synthetic construct
EIQMTQSPSSLSASVGDRVTITCRASQDISNYLNWYQQKPGKVPKLLIYYTSRLHSGVPSRFSGSGSGTDFTLTISSLQPEDVATYYCVQYAQFPLTFGCGTKVEIK

SEQ ID NO: 203 - protein, 5 aa, Synthetic construct
SSWMN

SEQ ID NO: 204 - protein, 17 aa, Synthetic construct
RIYTGTGETKYSGKFQG

SEQ ID NO: 205 - protein, 12 aa, Synthetic construct
QRDYGALYAMDY

SEQ ID NO: 206 - protein, 11 aa, Synthetic construct
RASDDIYSYLA

SEQ ID NO: 207 - protein, 7 aa, Synthetic construct
NAKTLAE

SEQ ID NO: 208 - protein, 9 aa, Synthetic construct
QNHDRTPFT

SEQ ID NO: 209 - protein, 121 aa, Synthetic construct
QVQLVQSGAEVVKPGASVKVSCKASGYTFTSSWMNWVRQAPGQCLEWMGRIYTGTGETKYSGKFQGRVTITRDTSASTAYMELSSLTSEDTAVYYCARQRDYGALYAMDYWGQGTLVTVSS

SEQ ID NO: 210 - protein, 107 aa, Synthetic construct
DIQLTQSPSFLSASVGDRVTITCRASDDIYSYLAWYQQKPGKAPKLLVYNAKTLAEGVPSRFSGSGSGTEFTLTISSLQPEDFATYYCQNHDRTPFTFGCGTKVDIK

SEQ ID NO: 211 - protein, 107 aa, Synthetic construct
EIQLTQSPSFLSASVGDRVTITCRASDDIYSYLAWYQQKPGKAPKLLVYNAKTLAEGVPSRFSGSGSGTEFTLTISSLQPEDFATYYCQNHDRTPFTFGCGTKVDIK

SEQ ID NO: 212 - protein, 5 aa, Synthetic construct
NYWMN

SEQ ID NO: 213 - protein, 17 aa, Synthetic construct
NIHSKAHGTNYNQKFQG

SEQ ID NO: 214 - protein, 8 aa, Synthetic construct
RYFYVMDY

SEQ ID NO: 215 - protein, 11 aa, Synthetic construct
RASQDISNYLN

SEQ ID NO: 216 - protein, 7 aa, Synthetic construct
YTSRLHS

SEQ ID NO: 217 - protein, 9 aa, Synthetic construct
VQYAQFPLT

SEQ ID NO: 218 - protein, 117 aa, Synthetic construct
QVQLVQSGAEVKKPGASVKVSCKASGYTFTNYWMNWVRQAPGQCLEWMGNIHSKAHGTNYNQKFQGRVTMTVDTSSSTAYMELSRLRSDDTAVYYCATRYFYVMDYWGQGTLVTVSS

SEQ ID NO: 219 - protein, 107 aa, Synthetic construct; identical to SEQ ID NO: 201

SEQ ID NO: 220 - protein, 107 aa, Synthetic construct; identical to SEQ ID NO: 202

SEQ ID NO: 221 - protein, 5 aa, Synthetic construct
SYWMH

SEQ ID NO: 222 - protein, 17 aa, Synthetic construct
VIRTSTSYTIYNQKFKG

SEQ ID NO: 223 - protein, 8 aa, Synthetic construct
SGPGYFDV

SEQ ID NO: 224 - protein, 11 aa, Synthetic construct
RASENIYSYLA

SEQ ID NO: 225 - protein, 7 aa, Synthetic construct
NAKTLAE

SEQ ID NO: 226 - protein, 9 aa, Synthetic construct
QHNYGTPYT

SEQ ID NO: 227 - protein, 117 aa, Synthetic construct
QVQLVQSGAEVKKPGASVKVSCKASGYTFTSYWMHWVRQAPGQCLEWMGVIRTSTSYTIYNQKFKGRVTMTRDTSTSTVYMELSSLRSEDTAVYYCARSGPGYFDVWGQGTMVTVSS

SEQ ID NO: 228 - protein, 107 aa, Synthetic construct
DIQLTQSPSFLSASVGDRVTITCRASENIYSYLAWYQQKPGKAPKLLIYNAKTLAEGVPSRFSGSGSGTEFTLTISSLQPEDFATYYCQHNYGTPYTFGCGTKLEIK

SEQ ID NO: 229 - protein, 107 aa, Synthetic construct
EIQLTQSPSFLSASVGDRVTITCRASENIYSYLAWYQQKPGKAPKLLIYNAKTLAEGVPSRFSGSGSGTEFTLTISSLQPEDFATYYCQHNYGTPYTFGCGTKLEIK

SEQ ID NO: 230 - protein, 5 aa, Synthetic construct
SYWMY

SEQ ID NO: 231 - protein, 17 aa, Synthetic construct
KIDPSDDYTNYNQKVKG

SEQ ID NO: 232 - protein, 8 aa, Synthetic construct
WDYTHFDV

SEQ ID NO: 233 - protein, 10 aa, Synthetic construct
RASSSVSYMH

SEQ ID NO: 234 - protein, 7 aa, Synthetic construct
GTSNLAS

SEQ ID NO: 235 - protein, 9 aa, Synthetic construct
QQWSSYPLT

SEQ ID NO: 236 - protein, 117 aa, Synthetic construct
EVQLLESGGGLVQPGGSVRLSCAASGFTFSSYWMYWVRQAPGKCLEWVSKIDPSDDYTNYNQKVKGRFTISIDNSKNTLYLQMNSLRAEDSAVYYCARWDYTHFDVWGQGTTVTVSS

SEQ ID NO: 237 - protein, 106 aa, Synthetic construct
EIVMTQSPATLSVSPGERATLSCRASSSVSYMHWYQQKPGQAPRLLIYGTSNLASGVPVRFSGSGSGTEFTLTISRLQSEDVAVYYCQQWSSYPLTFGCGTKVEIK

SEQ ID NO: 238 - protein, 5 aa, Synthetic construct
SYWMH

SEQ ID NO: 239 - protein, 17 aa, Synthetic construct
KIDPSDDYTNYNQKVKG

SEQ ID NO: 240 - protein, 8 aa, Synthetic construct
WDYSHFDV

SEQ ID NO: 241 - protein, 10 aa, Synthetic construct
RASSSVSYMH

SEQ ID NO: 242 - protein, 7 aa, Synthetic construct
GTSNLVS

SEQ ID NO: 243 - protein, 9 aa, Synthetic construct
QQWSSYPLT

SEQ ID NO: 244 - protein, 117 aa, Synthetic construct
EVQLLESGGGLVQPGGSLRLSCAASGFTFSSYWMHWVRQTPGKCLEWVSKIDPSDDYTNYNQKVKGRFTISIDKSKNTLYLQMNSLRAEDTAVYYCARWDYSHFDVWGQGTTVTVSS

SEQ ID NO: 245 - protein, 106 aa, Synthetic construct; identical to SEQ ID NO: 184

SEQ ID NO: 246 - protein, 1491 aa, Synthetic construct
EVQLLESGGGLVQPGGSLRLSCAASGFSFSSYPINWVRQAPGKCLEWVGVIWTGGGTNYASSVKGRFTISRDNSKNTVYLQMNSLRAEDTAVYYCAKSRGVYDFKGRGAMDYWGQGTLVTVSSGGGGSGGGGSGGGGSDIVMTQSPDSLAVSLGERATINCKSSQSLLYSSNQKNYFAWYQQKPGQPPKLLIYWASTRESGVPDRFSGSGSGTDFTLTISSLQAEDVAVYYCQQYYSYPYTFGCGTKLEIKSGGGGSEVQLVESGGGLVQPGGSLKLSCAASGFTFNKYAMNWVRQAPGKCLEWVARIRSKYNNYATYYADSVKDRFTISRDDSKNTAYLQMNNLKTEDTAVYYCVRHGNFGNSYISYWAYWGQGTLVTVSSGGGGSGGGGSGGGGSQTVVTQEPSLTVSPGGTVTLTCGSSTGAVTSGNYPNWVQQKPGQAPRGLIGGTKFLAPGTPARFSGSLLGGKAALTLSGVQPEDEAEYYCVLWYSNRWVFGCGTKLTVLGGGGDKTHTCPPCPAPELLGGPSVFLFPPKPKDTLMISRTPEVTCVVVDVSHEDPEVKFNWYVDGVEVHNAKTKPCEEQYGSTYRCVSVLTVLHQDWLNGKEYKCKVSNKALPAPIEKTISKAKGQPREPQVYTLPPSREEMTKNQVSLTCLVKGFYPSDIAVEWESNGQPENNYKTTPPVLDSDGSFFLYSKLTVDKSRWQQGNVFSCSVMHEALHNHYTQKSLSLSPGKGGGGSGGGGSGGGGSGGGGSGGGGSGGGGSDKTHTCPPCPAPELLGGPSVFLFPPKPKDTLMISRTPEVTCVVVDVSHEDPEVKFNWYVDGVEVHNAKTKPCEEQYGSTYRCVSVLTVLHQDWLNGKEYKCKVSNKALPAPIEKTISKAKGQPREPQVYTLPPSREEMTKNQVSLTCLVKGFYPSDIAVEWESNGQPENNYKTTPPVLDSDGSFFLYSKLTVDKSRWQQGNVFSCSVMHEALHNHYTQKSLSLSPGKGGGGQVQLVESGGGLVKPGGSLRLSCAASGFTFSDYYMTWIRQAPGKCLEWLSYISSSGSTIYYAEAVKGRFTISRDNAKNSLFLQMNSLRAEDTAVYYCARDRNSHFDYWGQGTLVTVSSGGGGSGGGGSGGGGSDIMTQSPSSVSASVGDRVTITCRASQGIRTWLAWYQQKPGKAPKLLIYGASGLQSGVPSRFSGSGSGTDFTLTISSLQPEDFATYYCQQAESFPRTFGCGTKVEIKSGGGGSEVQLVESGGGLVQPGGSLKLSCAASGFTFNKYAMNWVRQAPGKCLEWVARIRSKYNNYATYYADSVKDRFTISRDDSKNTAYLQMNNLKTEDTAVYYCVRHGNFGNSYISYWAYWGQGTLVTVSSGGGGSGGGGSGGGGSQTVVTQEPSLTVSPGGTVTLTCGSSTGAVTSGNYPNWVQQKPGQAPRGLIGGTKFLAPGTPARFSGSLLGGKAALTLSGVQPEDEAEYYCVLWYSNRWVFGCGTKLTVL

SEQ ID NO: 247 - protein, 1509 aa, Synthetic construct
EVQLLESGGGLVQPGGSLRLSCAASGFTFSSYWMHWVRQTPGKCLEWVSKIDPSDDYTNYNQKVKGRFTISIDKSKNTLYLQMNSLRAEDTAVYYCARWDYNYFDVWGQGTTVTVSSGGGGSGGGGSGGGGSEIVMTQSPATLSVSPGERATLTCRASSSVSYMHWYQQKPGQAPRLLIYGTSNLVSGVPARFSGSGSGTEFTLTISSLQSEDFAVYYCQQWSSYPLTFGCGTKVEIKSGGGGSEVQLVESGGGLVQPGGSLKLSCAASGFTFNKYAMNWVRQAPGKCLEWVARIRSKYNNYATYYADSVKDRFTISRDDSKNTAYLQMNNLKTEDTAVYYCVRHGNFGNSYISYWAYWGQGTLVTVSSGGGGSGGGGSGGGGSQTVVTQEPSLTVSPGGTVTLTCGSSTGAVTSGNYPNWVQQKPGQAPRGLIGGTKFLAPGTPARFSGSLLGGKAALTLSGVQPEDEAEYYCVLWYSNRWVFGCGTKLTVLGGGGSGGGGSGGGGSDKTHTCPPCPAPELLGGPSVFLFPPKPKDTLMISRTPEVTCVVVDVSHEDPEVKFNWYVDGVEVHNAKTKPCEEQYGSTYRCVSVLTVLHQDWLNGKEYKCKVSNKALPAPIEKTISKAKGQPREPQVYTLPPSREEMTKNQVSLTCLVKGFYPSDIAVEWESNGQPENNYKTTPPVLDSDGSFFLYSKLTVDKSRWQQGNVFSCSVMHEALHNHYTQKSLSLSPGKGGGGSGGGGSGGGGSGGGGSGGGGSGGGGSDKTHTCPPCPAPELLGGPSVFLFPPKPKDTLMISRTPEVTCVVVDVSHEDPEVKFNWYVDGVEVHNAKTKPCEEQYGSTYRCVSVLTVLHQDWLNGKEYKCKVSNKALPAPIEKTISKAKGQPREPQVYTLPPSREEMTKNQVSLTCLVKGFYPSDIAVEWESNGQPENNYKTTPPVLDSDGSFFLYSKLTVDKSRWQQGNVFSCSVMHEALHNHYTQKSLSLSPGKGGGGSGGGGSGGGGSQVQLVQSGAEVKKPGASVKVSCKASGYTFTGYYIHWVRQAPGQCLEWMGWINPNSGGTNYAQKFQGRVTMTRDTSISTAYMELSRLRSDDTAVYYCARVEAVAGREYYYFSGMDVWGQGTTVTVSSGGGGSGGGGSGGGGSSYELTQPPSVSVSPGQTASITCSGEKLGDKYVYWYQQKPGQSPVLVIYQSTKRPSGVPERFSGSNSGNTATLTISGTQAMDEADYYCQAYHASTAVFGCGTKLTVLSGGGGSEVQLVESGGGLVQPGGSLKLSCAASGFTFNKYAMNWVRQAPGKCLEWVARIRSKYNNYATYYADSVKDRFTISRDDSKNTAYLQMNNLKTEDTAVYYCVRHGNFGNSYISYWAYWGQGTLVTVSSGGGGSGGGGSGGGGSQTVVTQEPSLTVSPGGTVTLTCGSSTGAVTSGNYPNWVQQKPGQAPRGLIGGTKFLAPGTPARFSGSLLGGKAALTLSGVQPEDEAEYYCVLWYSNRWVFGCGTKLTVL

SEQ ID NO: 248 - protein, 1509 aa, Synthetic construct
EVQLLESGGGLVQPGGSLRLSCAASGFTFSSYWMHWVRQTPGKCLEWVSKIDPSDDYTNYNQKVKGRFTISIDKSKNTLYLQMNSLRAEDTAVYYCARWDYNYFDVWGQGTTVTVSSGGGGSGGGGSGGGGSEIVMTQSPATLSVSPGERATLTCRASSSVSYMHWYQQKPGQAPRLLIYGTSNLVSGVPARFSGSGSGTEFTLTISSLQSEDFAVYYCQQWSSYPLTFGCGTKVEIKSGGGGSEVQLVESGGGLVQPGGSLKLSCAASGFTFNKYAMNWVRQAPGKGMEWVARIRSKYNNYATYYADAVKDRFTISRDDSKNTLYLQMNNLKTEDTAVYYCVRAGNFGSSYISYFAYWGQGTLVTVSSGGGGSGGGGSGGGGSQTVVTQEPSLTVSPGGTVTITCGSSTGAVTSGNYPNWIQKKPGQAPRGLIGGTKFLAPGTPARFSGSLEGGKAALTLSGVQPEDEAEYYCVLYYSNRWVFGSGTKLTVLGGGGSGGGGSGGGGSDKTHTCPPCPAPELLGGPSVFLFPPKPKDTLMISRTPEVTCVVVDVSHEDPEVKFNWYVDGVEVHNAKTKPCEEQYGSTYRCVSVLTVLHQDWLNGKEYKCKVSNKALPAPIEKTISKAKGQPREPQVYTLPPSREEMTKNQVSLTCLVKGFYPSDIAVEWESNGQPENNYKTTPPVLDSDGSFFLYSKLTVDKSRWQQGNVFSCSVMHEALHNHYTQKSLSLSPGKGGGGSGGGGSGGGGSGGGGSGGGGSGGGGSDKTHTCPPCPAPELLGGPSVFLFPPKPKDTLMISRTPEVTCVVVDVSHEDPEVKFNWYVDGVEVHNAKTKPCEEQYGSTYRCVSVLTVLHQDWLNGKEYKCKVSNKALPAPIEKTISKAKGQPREPQVYTLPPSREEMTKNQVSLTCLVKGFYPSDIAVEWESNGQPENNYKTTPPVLDSDGSFFLYSKLTVDKSRWQQGNVFSCSVMHEALHNHYTQKSLSLSPGKGGGGSGGGGSGGGGSQVQLVQSGAEVKKPGASVKVSCKASGYTFTGYYIHWVRQAPGQCLEWMGWINPNSGGTNYAQKFQGRVTMTRDTSISTAYMELSRLRSDDTAVYYCARVEAVAGREYYYFSGMDVWGQGTTVTVSSGGGGSGGGGSGGGGSSYELTQPPSVSVSPGQTASITCSGEKLGDKYVYWYQQKPGQSPVLVIYQSTKRPSGVPERFSGSNSGNTATLTISGTQAMDEADYYCQAYHASTAVFGCGTKLTVLSGGGGSEVQLVESGGGLVQPGGSLKLSCAASGFTFNKYAMNWVRQAPGKGMEWVARIRSKYNNYATYYADAVKDRFTISRDDSKNTLYLQMNNLKTEDTAVYYCVRAGNFGSSYISYFAYWGQGTLVTVSSGGGGSGGGGSGGGGSQTVVTQEPSLTVSPGGTVTITCGSSTGAVTSGNYPNWIQKKPGQAPRGLIGGTKFLAPGTPARFSGSLEGGKAALTLSGVQPEDEAEYYCVLYYSNRWVFGSGTKLTVL

SEQ ID NO: 249 - protein, 1487 aa, Synthetic construct
EVQLLESGGGLVQPGGSLRLSCAASGFTFSSYWMHWVRQTPGKCLEWVSKIDPSDDYTNYNQKVKGRFTISIDKSKNTLYLQMNSLRAEDTAVYYCARWDYNYFDVWGQGTTVTVSSGGGGSGGGGSGGGGSEIVMTQSPATLSVSPGERATLTCRASSSVSYMHWYQQKPGQAPRLLIYGTSNLVSGVPARFSGSGSGTEFTLTISSLQSEDFAVYYCQQWSSYPLTFGCGTKVEIKSGGGGSEVQLVESGGGLVQPGGSLKLSCAASGFTFNKYAMNWVRQAPGKCLEWVARIRSKYNNYATYYADSVKDRFTISRDDSKNTAYLQMNNLKTEDTAVYYCVRHGNFGNSYISYWAYWGQGTLVTVSSGGGGSGGGGSGGGGSQTVVTQEPSLTVSPGGTVTLTCGSSTGAVTSGNYPNWVQQKPGQAPRGLIGGTKFLAPGTPARFSGSLLGGKAALTLSGVQPEDEAEYYCVLWYSNRWVFGCGTKLTVLGGGGDKTHTCPPCPAPELLGGPSVFLFPPKPKDTLMISRTPEVTCVVVDVSHEDPEVKFNWYVDGVEVHNAKTKPCEEQYGSTYRCVSVLTVLHQDWLNGKEYKCKVSNKALPAPIEKTISKAKGQPREPQVYTLPPSREEMTKNQVSLTCLVKGFYPSDIAVEWESNGQPENNYKTTPPVLDSDGSFFLYSKLTVDKSRWQQGNVFSCSVMHEALHNHYTQKSLSLSPGKGGGGSGGGGSGGGGSGGGGSGGGGSGGGGSDKTHTCPPCPAPELLGGPSVFLFPPKPKDTLMISRTPEVTCVVVDVSHEDPEVKFNWYVDGVEVHNAKTKPCEEQYGSTYRCVSVLTVLHQDWLNGKEYKCKVSNKALPAPIEKTISKAKGQPREPQVYTLPPSREEMTKNQVSLTCLVKGFYPSDIAVEWESNGQPENNYKTTPPVLDSDGSFFLYSKLTVDKSRWQQGNVFSCSVMHEALHNHYTQKSLSLSPGKGGGGQVQLVQSGAEVKKPGASVKVSCKASGYTFTGYYIHWVRQAPGQCLEWMGWINPNSGGTNYAQKFQGRVTMTRDTSISTAYMELSRLRSDDTAVYYCARVEAVAGREYYYFSGMDVWGQGTTVTVSSGGGGSGGGGSGGGGSSYELTQPPSVSVSPGQTASITCSGEKLGDKYVYWYQQKPGQSPVLVIYQSTKRPSGVPERFSGSNSGNTATLTISGTQAMDEADYYCQAYHASTAVFGCGTKLTVLSGGGGSEVQLVESGGGLVQPGGSLKLSCAASGFTFNKYAMNWVRQAPGKCLEWVARIRSKYNNYATYYADSVKDRFTISRDDSKNTAYLQMNNLKTEDTAVYYCVRHGNFGNSYISYWAYWGQGTLVTVSSGGGGSGGGGSGGGGSQTVVTQEPSLTVSPGGTVTLTCGSSTGAVTSGNYPNWVQQKPGQAPRGLIGGTKFLAPGTPARFSGSLLGGKAALTLSGVQPEDEAEYYCVLWYSNRWVFGCGTKLTVL

SEQ ID NO: 250 - protein, 1496 aa, Synthetic construct
QVQLVQSGAEVKKPGASVKVSCKASGYTFTNYWMNWVRQAPGQCLEWMGNIAYGVKGTNYNQKFQGRVTMTVDTSSSTAYMELSRLRSDDTAVYYCATRYFYVMDYWGQGTLVTVSSGGGGQGGGGQGGGGQDIQMTQSPSSLSASVGDRVTITCRASQDISNYLNWYQQKPGKVPKLLIYYTSRLHSGVPSRFSGSGSGTDFTLTISSLQPEDVATYYCVQYAQFPLTFGCGTKVEIKSGGGGQEVQLVESGGGLVQPGGSLKLSCAASGFTFNKYAMNWVRQAPGKGMEWVARIRSKYNNYATYYADAVKDRFTISRDDSKNTLYLQMNNLKTEDTAVYYCVRAGNFGSSYISYFAYWGQGTLVTVSSGGGGQGGGGQGGGGQQTVVTQEPSLTVSPGGTVTITCGSSTGAVTSGNYPNWIQKKPGQAPRGLIGGTKFLAPGTPARFSGSLEGGKAALTLSGVQPEDEAEYYCVLYYSNRWVFGSGTKLTVLGGGGQGGGGQGGGGQCPPCPAPELLGGPSVFLFPPKPKDTLMISRTPEVTCVVVDVSHEEPEVKFNWYVDGVEVHNAKTKPCEEQYGSTYRCVSVLTVLHQDWLNGKEYKCKVSNKALPAPIEKTISKAKGQPREPQVYTLPPSREEMTKNQVSLTCLVKGFYPSDIAVEWESNGQPENNYKTTPPVLDSDGSFFLYSKLTVDKSRWQQGNVFSCSVMHEALHNHYTQKSLSLSPGKGGGGQGGGGQGGGGQGGGGQGGGGQGGGGQCPPCPAPELLGGPSVFLFPPKPKDTLMISRTPEVTCVVVDVSHEEPEVKFNWYVDGVEVHNAKTKPCEEQYGSTYRCVSVLTVLHQDWLNGKEYKCKVSNKALPAPIEKTISKAKGQPREPQVYTLPPSREEMTKNQVSLTCLVKGFYPSDIAVEWESNGQPENNYKTTPPVLDSDGSFFLYSKLTVDKSRWQQGNVFSCSVMHEALHNHYTQKSLSLSPGKGGGGQGGGGQGGGGQQVQLQESGPGLVKPSETLSLTCTVSGGSISSSSYFWGWIRQPPGKCLEWIGNIYYSGSSNYNPSLKSRVTISVDTSKNQFSLKLSSVTAADTAVYYCARLPRGDRDAFDIWGQGTMVTVSSGGGGQGGGGQGGGGQDIVMTQSPSSLSASVGDRVTITCRASQGISNYLAWYQQKPGKVPKLLIYAASTLQSGVPSRFSGSGSGTDFTLTISSLQPEDFATYYCQQSYSTPFTFGCGTKVEIKSGGGGQEVQLVESGGGLVQPGGSLKLSCAASGFTFNKYAMNWVRQAPGKGMEWVARIRSKYNNYATYYADAVKDRFTISRDDSKNTLYLQMNNLKTEDTAVYYCVRAGNFGSSYISYFAYWGQGTLVTVSSGGGGQGGGGQGGGGQQTVVTQEPSLTVSPGGTVTITCGSSTGAVTSGNYPNWIQKKPGQAPRGLIGGTKFLAPGTPARFSGSLEGGKAALTLSGVQPEDEAEYYCVLYYSNRWVFGSGTKLTVL

SEQ ID NO: 251 - protein, 1474 aa, Synthetic construct
QVQLVQSGAEVKKPGASVKVSCKASGYTFTNYWMNWVRQAPGQCLEWMGNIAYGVKGTNYNQKFQGRVTMTVDTSSSTAYMELSRLRSDDTAVYYCATRYFYVMDYWGQGTLVTVSSGGGGQGGGGQGGGGQDIQMTQSPSSLSASVGDRVTITCRASQDISNYLNWYQQKPGKVPKLLIYYTSRLHSGVPSRFSGSGSGTDFTLTISSLQPEDVATYYCVQYAQFPLTFGCGTKVEIKSGGGGQEVQLVESGGGLVQPGGSLKLSCAASGFTFNKYAMNWVRQAPGKGMEWVARIRSKYNNYATYYADAVKDRFTISRDDSKNTLYLQMNNLKTEDTAVYYCVRAGNFGSSYISYFAYWGQGTLVTVSSGGGGQGGGGQGGGGQQTVVTQEPSLTVSPGGTVTITCGSSTGAVTSGNYPNWIQKKPGQAPRGLIGGTKFLAPGTPARFSGSLEGGKAALTLSGVQPEDEAEYYCVLYYSNRWVFGSGTKLTVLGGGGCPPCPAPELLGGPSVFLFPPKPKDTLMISRTPEVTCVVVDVSHEEPEVKFNWYVDGVEVHNAKTKPCEEQYGSTYRCVSVLTVLHQDWLNGKEYKCKVSNKALPAPIEKTISKAKGQPREPQVYTLPPSREEMTKNQVSLTCLVKGFYPSDIAVEWESNGQPENNYKTTPPVLDSDGSFFLYSKLTVDKSRWQQGNVFSCSVMHEALHNHYTQKSLSLSPGKGGGGQGGGGQGGGGQGGGGQGGGGQGGGGQCPPCPAPELLGGPSVFLFPPKPKDTLMISRTPEVTCVVVDVSHEEPEVKFNWYVDGVEVHNAKTKPCEEQYGSTYRCVSVLTVLHQDWLNGKEYKCKVSNKALPAPIEKTISKAKGQPREPQVYTLPPSREEMTKNQVSLTCLVKGFYPSDIAVEWESNGQPENNYKTTPPVLDSDGSFFLYSKLTVDKSRWQQGNVFSCSVMHEALHNHYTQKSLSLSPGKGGGGQVQLQESGPGLVKPSETLSLTCTVSGGSISSSSYFWGWIRQPPGKCLEWIGNIYYSGSSNYNPSLKSRVTISVDTSKNQFSLKLSSVTAADTAVYYCARLPRGDRDAFDIWGQGTMVTVSSGGGGQGGGGQGGGGQDIVMTQSPSSLSASVGDRVTITCRASQGISNYLAWYQQKPGKVPKLLIYAASTLQSGVPSRFSGSGSGTDFTLTISSLQPEDFATYYCQQSYSTPFTFGCGTKVEIKSGGGGQEVQLVESGGGLVQPGGSLKLSCAASGFTFNKYAMNWVRQAPGKGMEWVARIRSKYNNYATYYADAVKDRFTISRDDSKNTLYLQMNNLKTEDTAVYYCVRAGNFGSSYISYFAYWGQGTLVTVSSGGGGQGGGGQGGGGQQTVVTQEPSLTVSPGGTVTITCGSSTGAVTSGNYPNWIQKKPGQAPRGLIGGTKFLAPGTPARFSGSLEGGKAALTLSGVQPEDEAEYYCVLYYSNRWVFGSGTKLTVL

SEQ ID NO: 252 - protein, 1484 aa, Synthetic construct
QVQLVQSGAEVKKPGASVKVSCKASGYTFTNYWMNWVRQAPGQCLEWMGNIAYGVKGTNYNQKFQGRVTMTVDTSSSTAYMELSRLRSDDTAVYYCATRYFYVMDYWGQGTLVTVSSGGGGSGGGGSGGGGSDIQMTQSPSSLSASVGDRVTITCRASQDISNYLNWYQQKPGKVPKLLIYYTSRLHSGVPSRFSGSGSGTDFTLTISSLQPEDVATYYCVQYAQFPLTFGCGTKVEIKSGGGGSEVQLVESGGGLVQPGGSLKLSCAASGFTFNKYAMNWVRQAPGKGMEWVARIRSKYNNYATYYADAVKDRFTISRDDSKNTLYLQMNNLKTEDTAVYYCVRAGNFGSSYISYFAYWGQGTLVTVSSGGGGSGGGGSGGGGSQTVVTQEPSLTVSPGGTVTITCGSSTGAVTSGNYPNWIQKKPGQAPRGLIGGTKFLAPGTPARFSGSLEGGKAALTLSGVQPEDEAEYYCVLYYSNRWVFGSGTKLTVLGGGGDKTHTCPPCPAPELLGGPSVFLFPPKPKDTLMISRTPEVTCVVVDVSHEDPEVKFNWYVDGVEVHNAKTKPCEEQYGSTYRCVSVLTVLHQDWLNGKEYKCKVSNKALPAPIEKTISKAKGQPREPQVYTLPPSREEMTKNQVSLTCLVKGFYPSDIAVEWESNGQPENNYKTTPPVLDSDGSFFLYSKLTVDKSRWQQGNVFSCSVMHEALHNHYTQKSLSLSPGKGGGGSGGGGSGGGGSGGGGSGGGGSGGGGSDKTHTCPPCPAPELLGGPSVFLFPPKPKDTLMISRTPEVTCVVVDVSHEDPEVKFNWYVDGVEVHNAKTKPCEEQYGSTYRCVSVLTVLHQDWLNGKEYKCKVSNKALPAPIEKTISKAKGQPREPQVYTLPPSREEMTKNQVSLTCLVKGFYPSDIAVEWESNGQPENNYKTTPPVLDSDGSFFLYSKLTVDKSRWQQGNVFSCSVMHEALHNHYTQKSLSLSPGKGGGGQVQLQESGPGLVKPSETLSLTCTVSGGSISSSSYFWGWIRQPPGKCLEWIGNIYYSGSSNYNPSLKSRVTISVDTSKNQFSLKLSSVTAADTAVYYCARLPRGDRDAFDIWGQGTMVTVSSGGGGSGGGGSGGGGSDIVMTQSPSSLSASVGDRVTITCRASQGISNYLAWYQQKPGKVPKLLIYAASTLQSGVPSRFSGSGSGTDFTLTISSLQPEDFATYYCQQSYSTPFTFGCGTKVEIKSGGGGSEVQLVESGGGLVQPGGSLKLSCAASGFTFNKYAMNWVRQAPGKGMEWVARIRSKYNNYATYYADAVKDRFTISRDDSKNTLYLQMNNLKTEDTAVYYCVRAGNFGSSYISYFAYWGQGTLVTVSSGGGGSGGGGSGGGGSQTVVTQEPSLTVSPGGTVTITCGSSTGAVTSGNYPNWIQKKPGQAPRGLIGGTKFLAPGTPARFSGSLEGGKAALTLSGVQPEDEAEYYCVLYYSNRWVFGSGTKLTVL

SEQ ID NO: 253 - protein, 1506 aa, Synthetic construct
QVQLVQSGAEVKKPGASVKVSCKASGYTFTNYWMNWVRQAPGQCLEWMGNIAYGVKGTNYNQKFQGRVTMTVDTSSSTAYMELSRLRSDDTAVYYCATRYFYVMDYWGQGTLVTVSSGGGGSGGGGSGGGGSDIQMTQSPSSLSASVGDRVTITCRASQDISNYLNWYQQKPGKVPKLLIYYTSRLHSGVPSRFSGSGSGTDFTLTISSLQPEDVATYYCVQYAQFPLTFGCGTKVEIKSGGGGSEVQLVESGGGLVQPGGSLKLSCAASGFTFNKYAMNWVRQAPGKGMEWVARIRSKYNNYATYYADAVKDRFTISRDDSKNTLYLQMNNLKTEDTAVYYCVRAGNFGSSYISYFAYWGQGTLVTVSSGGGGSGGGGSGGGGSQTVVTQEPSLTVSPGGTVTITCGSSTGAVTSGNYPNWIQKKPGQAPRGLIGGTKFLAPGTPARFSGSLEGGKAALTLSGVQPEDEAEYYCVLYYSNRWVFGSGTKLTVLGGGGSGGGGSGGGGSDKTHTCPPCPAPELLGGPSVFLFPPKPKDTLMISRTPEVTCVVVDVSHEDPEVKFNWYVDGVEVHNAKTKPCEEQYGSTYRCVSVLTVLHQDWLNGKEYKCKVSNKALPAPIEKTISKAKGQPREPQVYTLPPSREEMTKNQVSLTCLVKGFYPSDIAVEWESNGQPENNYKTTPPVLDSDGSFFLYSKLTVDKSRWQQGNVFSCSVMHEALHNHYTQKSLSLSPGKGGGGSGGGGSGGGGSGGGGSGGGGSGGGGSDKTHTCPPCPAPELLGGPSVFLFPPKPKDTLMISRTPEVTCVVVDVSHEDPEVKFNWYVDGVEVHNAKTKPCEEQYGSTYRCVSVLTVLHQDWLNGKEYKCKVSNKALPAPIEKTISKAKGQPREPQVYTLPPSREEMTKNQVSLTCLVKGFYPSDIAVEWESNGQPENNYKTTPPVLDSDGSFFLYSKLTVDKSRWQQGNVFSCSVMHEALHNHYTQKSLSLSPGKGGGGSGGGGSGGGGSQVQLQESGPGLVKPSETLSLTCTVSGGSISSSSYFWGWIRQPPGKCLEWIGNIYYSGSSNYNPSLKSRVTISVDTSKNQFSLKLSSVTAADTAVYYCARLPRGDRDAFDIWGQGTMVTVSSGGGGSGGGGSGGGGSDIVMTQSPSSLSASVGDRVTITCRASQGISNYLAWYQQKPGKVPKLLIYAASTLQSGVPSRFSGSGSGTDFTLTISSLQPEDFATYYCQQSYSTPFTFGCGTKVEIKSGGGGSEVQLVESGGGLVQPGGSLKLSCAASGFTFNKYAMNWVRQAPGKGMEWVARIRSKYNNYATYYADAVKDRFTISRDDSKNTLYLQMNNLKTEDTAVYYCVRAGNFGSSYISYFAYWGQGTLVTVSSGGGGSGGGGSGGGGSQTVVTQEPSLTVSPGGTVTITCGSSTGAVTSGNYPNWIQKKPGQAPRGLIGGTKFLAPGTPARFSGSLEGGKAALTLSGVQPEDEAEYYCVLYYSNRWVFGSGTKLTVL

SEQ ID NO: 254 - protein, 1484 aa, Synthetic construct
QVQLVQSGAEVKKPGASVKVSCKASGYTFTNYWMNWVRQAPGQCLEWMGNIAYGVKGTNYNQKFQGRVTMTVDTSSSTAYMELSRLRSDDTAVYYCATRYFYVMDYWGQGTLVTVSSGGGGSGGGGSGGGGSDIQMTQSPSSLSASVGDRVTITCRASQDISNYLNWYQQKPGKVPKLLIYYTSRLHSGVPSRFSGSGSGTDFTLTISSLQPEDVATYYCVQYAQFPLTFGCGTKVEIKSGGGGSEVQLVESGGGLVQPGGSLKLSCAASGFTFNKYAINWVREAPGKGLEWVARIRSKYNNYATYYADAVKDRFTISRDDSKNTAYLQMNNLKTEDTAVYYCVRNANFGTSYISYFAYWGQGTLVTVSSGGGGSGGGGSGGGGSQTVVTQEPSLTVSPGGTVTLTCGSSTGAVTSGNYPNWVQKKPGQAPRGLIGGTKFLAPGTPARFSGSLLGGKAALTLSGVQPEDEAEYYCVLWYSNRWVFGSGTKLTVLGGGGDKTHTCPPCPAPELLGGPSVFLFPPKPKDTLMISRTPEVTCVVVDVSHEDPEVKFNWYVDGVEVHNAKTKPCEEQYGSTYRCVSVLTVLHQDWLNGKEYKCKVSNKALPAPIEKTISKAKGQPREPQVYTLPPSREEMTKNQVSLTCLVKGFYPSDIAVEWESNGQPENNYKTTPPVLDSDGSFFLYSKLTVDKSRWQQGNVFSCSVMHEALHNHYTQKSLSLSPGKGGGGSGGGGSGGGGSGGGGSGGGGSGGGGSDKTHTCPPCPAPELLGGPSVFLFPPKPKDTLMISRTPEVTCVVVDVSHEDPEVKFNWYVDGVEVHNAKTKPCEEQYGSTYRCVSVLTVLHQDWLNGKEYKCKVSNKALPAPIEKTISKAKGQPREPQVYTLPPSREEMTKNQVSLTCLVKGFYPSDIAVEWESNGQPENNYKTTPPVLDSDGSFFLYSKLTVDKSRWQQGNVFSCSVMHEALHNHYTQKSLSLSPGKGGGGQVQLQESGPGLVKPSETLSLTCTVSGGSISSSSYFWGWIRQPPGKCLEWIGNIYYSGSSNYNPSLKSRVTISVDTSKNQFSLKLSSVTAADTAVYYCARLPRGDRDAFDIWGQGTMVTVSSGGGGSGGGGSGGGGSDIVMTQSPSSLSASVGDRVTITCRASQGISNYLAWYQQKPGKVPKLLIYAASTLQSGVPSRFSGSGSGTDFTLTISSLQPEDFATYYCQQSYSTPFTFGCGTKVEIKSGGGGSEVQLVESGGGLVQPGGSLKLSCAASGFTFNKYAINWVREAPGKGLEWVARIRSKYNNYATYYADAVKDRFTISRDDSKNTAYLQMNNLKTEDTAVYYCVRNANFGTSYISYFAYWGQGTLVTVSSGGGGSGGGGSGGGGSQTVVTQEPSLTVSPGGTVTLTCGSSTGAVTSGNYPNWVQKKPGQAPRGLIGGTKFLAPGTPARFSGSLLGGKAALTLSGVQPEDEAEYYCVLWYSNRWVFGSGTKLTVL

SEQ ID NO: 255 - protein, 1496 aa, Synthetic construct
QVQLVQSGAEVKKPGASVKVSCKASGYTFTNYWMNWVRQAPGQCLEWMGNIAYGVKGTNYNQKFQGRVTMTVDTSSSTAYMELSRLRSDDTAVYYCATRYFYVMDYWGQGTLVTVSSGGGGQGGGGQGGGGQDIQMTQSPSSLSASVGDRVTITCRASQDISNYLNWYQQKPGKVPKLLIYYTSRLHSGVPSRFSGSGSGTDFTLTISSLQPEDVATYYCVQYAQFPLTFGCGTKVEIKSGGGGQEVQLVESGGGLVQPGGSLKLSCAASGFTFNKYAINWVREAPGKGLEWVARIRSKYNNYATYYADAVKDRFTISRDDSKNTAYLQMNNLKTEDTAVYYCVRNANFGTSYISYFAYWGQGTLVTVSSGGGGQGGGGQGGGGQQTVVTQEPSLTVSPGGTVTLTCGSSTGAVTSGNYPNWVQKKPGQAPRGLIGGTKFLAPGTPARFSGSLLGGKAALTLSGVQPEDEAEYYCVLWYSNRWVFGSGTKLTVLGGGGQGGGGQGGGGQCPPCPAPELLGGPSVFLFPPKPKDTLMISRTPEVTCVVVDVSHEEPEVKFNWYVDGVEVHNAKTKPCEEQYGSTYRCVSVLTVLHQDWLNGKEYKCKVSNKALPAPIEKTISKAKGQPREPQVYTLPPSREEMTKNQVSLTCLVKGFYPSDIAVEWESNGQPENNYKTTPPVLDSDGSFFLYSKLTVDKSRWQQGNVFSCSVMHEALHNHYTQKSLSLSPGKGGGGQGGGGQGGGGQGGGGQGGGGQGGGGQCPPCPAPELLGGPSVFLFPPKPKDTLMISRTPEVTCVVVDVSHEEPEVKFNWYVDGVEVHNAKTKPCEEQYGSTYRCVSVLTVLHQDWLNGKEYKCKVSNKALPAPIEKTISKAKGQPREPQVYTLPPSREEMTKNQVSLTCLVKGFYPSDIAVEWESNGQPENNYKTTPPVLDSDGSFFLYSKLTVDKSRWQQGNVFSCSVMHEALHNHYTQKSLSLSPGKGGGGQGGGGQGGGGQQVQLQESGPGLVKPSETLSLTCTVSGGSISSSSYFWGWIRQPPGKCLEWIGNIYYSGSSNYNPSLKSRVTISVDTSKNQFSLKLSSVTAADTAVYYCARLPRGDRDAFDIWGQGTMVTVSSGGGGQGGGGQGGGGQDIVMTQSPSSLSASVGDRVTITCRASQGISNYLAWYQQKPGKVPKLLIYAASTLQSGVPSRFSGSGSGTDFTLTISSLQPEDFATYYCQQSYSTPFTFGCGTKVEIKSGGGGQEVQLVESGGGLVQPGGSLKLSCAASGFTFNKYAINWVREAPGKGLEWVARIRSKYNNYATYYADAVKDRFTISRDDSKNTAYLQMNNLKTEDTAVYYCVRNANFGTSYISYFAYWGQGTLVTVSSGGGGQGGGGQGGGGQQTVVTQEPSLTVSPGGTVTLTCGSSTGAVTSGNYPNWVQKKPGQAPRGLIGGTKFLAPGTPARFSGSLLGGKAALTLSGVQPEDEAEYYCVLWYSNRWVFGSGTKLTVL

SEQ ID NO: 256 - protein, 1506 aa, Synthetic construct
QVQLVQSGAEVKKPGASVKVSCKASGYTFTNYWMNWVRQAPGQCLEWMGNIAYGVKGTNYNQKFQGRVTMTVDTSSSTAYMELSRLRSDDTAVYYCATRYFYVMDYWGQGTLVTVSSGGGGSGGGGSGGGGSDIQMTQSPSSLSASVGDRVTITCRASQDISNYLNWYQQKPGKVPKLLIYYTSRLHSGVPSRFSGSGSGTDFTLTISSLQPEDVATYYCVQYAQFPLTFGCGTKVEIKSGGGGSEVQLVESGGGLVQPGGSLKLSCAASGFTFNKYAINWVREAPGKGLEWVARIRSKYNNYATYYADAVKDRFTISRDDSKNTAYLQMNNLKTEDTAVYYCVRNANFGTSYISYFAYWGQGTLVTVSSGGGGSGGGGSGGGGSQTVVTQEPSLTVSPGGTVTLTCGSSTGAVTSGNYPNWVQKKPGQAPRGLIGGTKFLAPGTPARFSGSLLGGKAALTLSGVQPEDEAEYYCVLWYSNRWVFGSGTKLTVLGGGGSGGGGSGGGGSDKTHTCPPCPAPELLGGPSVFLFPPKPKDTLMISRTPEVTCVVVDVSHEDPEVKFNWYVDGVEVHNAKTKPCEEQYGSTYRCVSVLTVLHQDWLNGKEYKCKVSNKALPAPIEKTISKAKGQPREPQVYTLPPSREEMTKNQVSLTCLVKGFYPSDIAVEWESNGQPENNYKTTPPVLDSDGSFFLYSKLTVDKSRWQQGNVFSCSVMHEALHNHYTQKSLSLSPGKGGGGSGGGGSGGGGSGGGGSGGGGSGGGGSDKTHTCPPCPAPELLGGPSVFLFPPKPKDTLMISRTPEVTCVVVDVSHEDPEVKFNWYVDGVEVHNAKTKPCEEQYGSTYRCVSVLTVLHQDWLNGKEYKCKVSNKALPAPIEKTISKAKGQPREPQVYTLPPSREEMTKNQVSLTCLVKGFYPSDIAVEWESNGQPENNYKTTPPVLDSDGSFFLYSKLTVDKSRWQQGNVFSCSVMHEALHNHYTQKSLSLSPGKGGGGSGGGGSGGGGSQVQLQESGPGLVKPSETLSLTCTVSGGSISSSSYFWGWIRQPPGKCLEWIGNIYYSGSSNYNPSLKSRVTISVDTSKNQFSLKLSSVTAADTAVYYCARLPRGDRDAFDIWGQGTMVTVSSGGGGSGGGGSGGGGSDIVMTQSPSSLSASVGDRVTITCRASQGISNYLAWYQQKPGKVPKLLIYAASTLQSGVPSRFSGSGSGTDFTLTISSLQPEDFATYYCQQSYSTPFTFGCGTKVEIKSGGGGSEVQLVESGGGLVQPGGSLKLSCAASGFTFNKYAINWVREAPGKGLEWVARIRSKYNNYATYYADAVKDRFTISRDDSKNTAYLQMNNLKTEDTAVYYCVRNANFGTSYISYFAYWGQGTLVTVSSGGGGSGGGGSGGGGSQTVVTQEPSLTVSPGGTVTLTCGSSTGAVTSGNYPNWVQKKPGQAPRGLIGGTKFLAPGTPARFSGSLLGGKAALTLSGVQPEDEAEYYCVLWYSNRWVFGSGTKLTVL

SEQ ID NO: 257 - protein, 1474 aa, Synthetic construct
QVQLVQSGAEVKKPGASVKVSCKASGYTFTNYWMNWVRQAPGQCLEWMGNIAYGVKGTNYNQKFQGRVTMTVDTSSSTAYMELSRLRSDDTAVYYCATRYFYVMDYWGQGTLVTVSSGGGGQGGGGQGGGGQDIQMTQSPSSLSASVGDRVTITCRASQDISNYLNWYQQKPGKVPKLLIYYTSRLHSGVPSRFSGSGSGTDFTLTISSLQPEDVATYYCVQYAQFPLTFGCGTKVEIKSGGGGQEVQLVESGGGLVQPGGSLKLSCAASGFTFNKYAINWVREAPGKGLEWVARIRSKYNNYATYYADAVKDRFTISRDDSKNTAYLQMNNLKTEDTAVYYCVRNANFGTSYISYFAYWGQGTLVTVSSGGGGQGGGGQGGGGQQTVVTQEPSLTVSPGGTVTLTCGSSTGAVTSGNYPNWVQKKPGQAPRGLIGGTKFLAPGTPARFSGSLLGGKAALTLSGVQPEDEAEYYCVLWYSNRWVFGSGTKLTVLGGGGCPPCPAPELLGGPSVFLFPPKPKDTLMISRTPEVTCVVVDVSHEEPEVKFNWYVDGVEVHNAKTKPCEEQYGSTYRCVSVLTVLHQDWLNGKEYKCKVSNKALPAPIEKTISKAKGQPREPQVYTLPPSREEMTKNQVSLTCLVKGFYPSDIAVEWESNGQPENNYKTTPPVLDSDGSFFLYSKLTVDKSRWQQGNVFSCSVMHEALHNHYTQKSLSLSPGKGGGGQGGGGQGGGGQGGGGQGGGGQGGGGQCPPCPAPELLGGPSVFLFPPKPKDTLMISRTPEVTCVVVDVSHEEPEVKFNWYVDGVEVHNAKTKPCEEQYGSTYRCVSVLTVLHQDWLNGKEYKCKVSNKALPAPIEKTISKAKGQPREPQVYTLPPSREEMTKNQVSLTCLVKGFYPSDIAVEWESNGQPENNYKTTPPVLDSDGSFFLYSKLTVDKSRWQQGNVFSCSVMHEALHNHYTQKSLSLSPGKGGGGQVQLQESGPGLVKPSETLSLTCTVSGGSISSSSYFWGWIRQPPGKCLEWIGNIYYSGSSNYNPSLKSRVTISVDTSKNQFSLKLSSVTAADTAVYYCARLPRGDRDAFDIWGQGTMVTVSSGGGGQGGGGQGGGGQDIVMTQSPSSLSASVGDRVTITCRASQGISNYLAWYQQKPGKVPKLLIYAASTLQSGVPSRFSGSGSGTDFTLTISSLQPEDFATYYCQQSYSTPFTFGCGTKVEIKSGGGGQEVQLVESGGGLVQPGGSLKLSCAASGFTFNKYAINWVREAPGKGLEWVARIRSKYNNYATYYADAVKDRFTISRDDSKNTAYLQMNNLKTEDTAVYYCVRNANFGTSYISYFAYWGQGTLVTVSSGGGGQGGGGQGGGGQQTVVTQEPSLTVSPGGTVTLTCGSSTGAVTSGNYPNWVQKKPGQAPRGLIGGTKFLAPGTPARFSGSLLGGKAALTLSGVQPEDEAEYYCVLWYSNRWVFGSGTKLTVL

SEQ ID NO: 258 - protein, 1506 aa, Synthetic construct
QVQLVQSGAEVKKPGASVKVSCKASGYTFTNYWMNWVRQAPGQCLEWMGNIAYGVKGTNYNQKFQGRVTMTVDTSSSTAYMELSRLRSDDTAVYYCATRYFYVMDYWGQGTLVTVSSGGGGSGGGGSGGGGSDIQMTQSPSSLSASVGDRVTITCRASQDISNYLNWYQQKPGKVPKLLIYYTSRLHSGVPSRFSGSGSGTDFTLTISSLQPEDVATYYCVQYAQFPLTFGCGTKVEIKSGGGGSEVQLVESGGGLVQPGGSLKLSCAASGFTFNKYAMNWVRQAPGKCLEWVARIRSKYNNYATYYADSVKDRFTISRDDSKNTAYLQMNNLKTEDTAVYYCVRHGNFGNSYISYWAYWGQGTLVTVSSGGGGSGGGGSGGGGSQTVVTQEPSLTVSPGGTVTLTCGSSTGAVTSGNYPNWVQQKPGQAPRGLIGGTKFLAPGTPARFSGSLLGGKAALTLSGVQPEDEAEYYCVLWYSNRWVFGCGTKLTVLGGGGSGGGGSGGGGSDKTHTCPPCPAPELLGGPSVFLFPPKPKDTLMISRTPEVTCVVVDVSHEDPEVKFNWYVDGVEVHNAKTKPCEEQYGSTYRCVSVLTVLHQDWLNGKEYKCKVSNKALPAPIEKTISKAKGQPREPQVYTLPPSREEMTKNQVSLTCLVKGFYPSDIAVEWESNGQPENNYKTTPPVLDSDGSFFLYSKLTVDKSRWQQGNVFSCSVMHEALHNHYTQKSLSLSPGKGGGGSGGGGSGGGGSGGGGSGGGGSGGGGSDKTHTCPPCPAPELLGGPSVFLFPPKPKDTLMISRTPEVTCVVVDVSHEDPEVKFNWYVDGVEVHNAKTKPCEEQYGSTYRCVSVLTVLHQDWLNGKEYKCKVSNKALPAPIEKTISKAKGQPREPQVYTLPPSREEMTKNQVSLTCLVKGFYPSDIAVEWESNGQPENNYKTTPPVLDSDGSFFLYSKLTVDKSRWQQGNVFSCSVMHEALHNHYTQKSLSLSPGKGGGGSGGGGSGGGGSQVQLQESGPGLVKPSETLSLTCTVSGGSISSSSYFWGWIRQPPGKCLEWIGNIYYSGSSNYNPSLKSRVTISVDTSKNQFSLKLSSVTAADTAVYYCARLPRGDRDAFDIWGQGTMVTVSSGGGGSGGGGSGGGGSDIVMTQSPSSLSASVGDRVTITCRASQGISNYLAWYQQKPGKVPKLLIYAASTLQSGVPSRFSGSGSGTDFTLTISSLQPEDFATYYCQQSYSTPFTFGCGTKVEIKSGGGGSEVQLVESGGGLVQPGGSLKLSCAASGFTFNKYAMNWVRQAPGKCLEWVARIRSKYNNYATYYADSVKDRFTISRDDSKNTAYLQMNNLKTEDTAVYYCVRHGNFGNSYISYWAYWGQGTLVTVSSGGGGSGGGGSGGGGSQTVVTQEPSLTVSPGGTVTLTCGSSTGAVTSGNYPNWVQQKPGQAPRGLIGGTKFLAPGTPARFSGSLLGGKAALTLSGVQPEDEAEYYCVLWYSNRWVFGCGTKLTVL

SEQ ID NO: 259 - protein, 1506 aa, Synthetic construct
QVQLVQSGAEVKKPGASVKVSCKASGYTFTNYWMNWVRQAPGQCLEWMGNIHSKAHGTNYNQKFQGRVTMTVDTSSSTAYMELSRLRSDDTAVYYCATRYFYVMDYWGQGTLVTVSSGGGGSGGGGSGGGGSDIQMTQSPSSLSASVGDRVTITCRASQDISNYLNWYQQKPGKVPKLLIYYTSRLHSGVPSRFSGSGSGTDFTLTISSLQPEDVATYYCVQYAQFPLTFGCGTKVEIKSGGGGSEVQLVESGGGLVQPGGSLKLSCAASGFTFNKYAMNWVRQAPGKGMEWVARIRSKYNNYATYYADAVKDRFTISRDDSKNTLYLQMNNLKTEDTAVYYCVRAGNFGSSYISYFAYWGQGTLVTVSSGGGGSGGGGSGGGGSQTVVTQEPSLTVSPGGTVTITCGSSTGAVTSGNYPNWIQKKPGQAPRGLIGGTKFLAPGTPARFSGSLEGGKAALTLSGVQPEDEAEYYCVLYYSNRWVFGSGTKLTVLGGGGSGGGGSGGGGSDKTHTCPPCPAPELLGGPSVFLFPPKPKDTLMISRTPEVTCVVVDVSHEDPEVKFNWYVDGVEVHNAKTKPCEEQYGSTYRCVSVLTVLHQDWLNGKEYKCKVSNKALPAPIEKTISKAKGQPREPQVYTLPPSREEMTKNQVSLTCLVKGFYPSDIAVEWESNGQPENNYKTTPPVLDSDGSFFLYSKLTVDKSRWQQGNVFSCSVMHEALHNHYTQKSLSLSPGKGGGGSGGGGSGGGGSGGGGSGGGGSGGGGSDKTHTCPPCPAPELLGGPSVFLFPPKPKDTLMISRTPEVTCVVVDVSHEDPEVKFNWYVDGVEVHNAKTKPCEEQYGSTYRCVSVLTVLHQDWLNGKEYKCKVSNKALPAPIEKTISKAKGQPREPQVYTLPPSREEMTKNQVSLTCLVKGFYPSDIAVEWESNGQPENNYKTTPPVLDSDGSFFLYSKLTVDKSRWQQGNVFSCSVMHEALHNHYTQKSLSLSPGKGGGGSGGGGSGGGGSQVQLQESGPGLVKPSETLSLTCTVSGGSISSSSYFWGWIRQPPGKCLEWIGNIYYSGSSNYNPSLKSRVTISVDTSKNQFSLKLSSVTAADTAVYYCARLPRGDRDAFDIWGQGTMVTVSSGGGGSGGGGSGGGGSDIVMTQSPSSLSASVGDRVTITCRASQGISNYLAWYQQKPGKVPKLLIYAASTLQSGVPSRFSGSGSGTDFTLTISSLQPEDFATYYCQQSYSTPFTFGCGTKVEIKSGGGGSEVQLVESGGGLVQPGGSLKLSCAASGFTFNKYAMNWVRQAPGKGMEWVARIRSKYNNYATYYADAVKDRFTISRDDSKNTLYLQMNNLKTEDTAVYYCVRAGNFGSSYISYFAYWGQGTLVTVSSGGGGSGGGGSGGGGSQTVVTQEPSLTVSPGGTVTITCGSSTGAVTSGNYPNWIQKKPGQAPRGLIGGTKFLAPGTPARFSGSLEGGKAALTLSGVQPEDEAEYYCVLYYSNRWVFGSGTKLTVL

SEQ ID NO: 260 - protein, 1474 aa, Synthetic construct
QVQLVQSGAEVKKPGASVKVSCKASGYTFTNYWMNWVRQAPGQCLEWMGNIHSKAHGTNYNQKFQGRVTMTVDTSSSTAYMELSRLRSDDTAVYYCATRYFYVMDYWGQGTLVTVSSGGGGQGGGGQGGGGQDIQMTQSPSSLSASVGDRVTITCRASQDISNYLNWYQQKPGKVPKLLIYYTSRLHSGVPSRFSGSGSGTDFTLTISSLQPEDVATYYCVQYAQFPLTFGCGTKVEIKSGGGGQEVQLVESGGGLVQPGGSLKLSCAASGFTFNKYAMNWVRQAPGKGMEWVARIRSKYNNYATYYADAVKDRFTISRDDSKNTLYLQMNNLKTEDTAVYYCVRAGNFGSSYISYFAYWGQGTLVTVSSGGGGQGGGGQGGGGQQTVVTQEPSLTVSPGGTVTITCGSSTGAVTSGNYPNWIQKKPGQAPRGLIGGTKFLAPGTPARFSGSLEGGKAALTLSGVQPEDEAEYYCVLYYSNRWVFGSGTKLTVLGGGGCPPCPAPELLGGPSVFLFPPKPKDTLMISRTPEVTCVVVDVSHEEPEVKFNWYVDGVEVHNAKTKPCEEQYGSTYRCVSVLTVLHQDWLNGKEYKCKVSNKALPAPIEKTISKAKGQPREPQVYTLPPSREEMTKNQVSLTCLVKGFYPSDIAVEWESNGQPENNYKTTPPVLDSDGSFFLYSKLTVDKSRWQQGNVFSCSVMHEALHNHYTQKSLSLSPGKGGGGQGGGGQGGGGQGGGGQGGGGQGGGGQCPPCPAPELLGGPSVFLFPPKPKDTLMISRTPEVTCVVVDVSHEEPEVKFNWYVDGVEVHNAKTKPCEEQYGSTYRCVSVLTVLHQDWLNGKEYKCKVSNKALPAPIEKTISKAKGQPREPQVYTLPPSREEMTKNQVSLTCLVKGFYPSDIAVEWESNGQPENNYKTTPPVLDSDGSFFLYSKLTVDKSRWQQGNVFSCSVMHEALHNHYTQKSLSLSPGKGGGGQVQLQESGPGLVKPSETLSLTCTVSGGSISSSSYFWGWIRQPPGKCLEWIGNIYYSGSSNYNPSLKSRVTISVDTSKNQFSLKLSSVTAADTAVYYCARLPRGDRDAFDIWGQGTMVTVSSGGGGQGGGGQGGGGQDIVMTQSPSSLSASVGDRVTITCRASQGISNYLAWYQQKPGKVPKLLIYAASTLQSGVPSRFSGSGSGTDFTLTISSLQPEDFATYYCQQSYSTPFTFGCGTKVEIKSGGGGQEVQLVESGGGLVQPGGSLKLSCAASGFTFNKYAMNWVRQAPGKGMEWVARIRSKYNNYATYYADAVKDRFTISRDDSKNTLYLQMNNLKTEDTAVYYCVRAGNFGSSYISYFAYWGQGTLVTVSSGGGGQGGGGQGGGGQQTVVTQEPSLTVSPGGTVTITCGSSTGAVTSGNYPNWIQKKPGQAPRGLIGGTKFLAPGTPARFSGSLEGGKAALTLSGVQPEDEAEYYCVLYYSNRWVFGSGTKLTVL

SEQ ID NO: 261 - protein, 1484 aa, Synthetic construct
QVQLVQSGAEVKKPGASVKVSCKASGYTFTNYWMNWVRQAPGQCLEWMGNIHSKAHGTNYNQKFQGRVTMTVDTSSSTAYMELSRLRSDDTAVYYCATRYFYVMDYWGQGTLVTVSSGGGGSGGGGSGGGGSDIQMTQSPSSLSASVGDRVTITCRASQDISNYLNWYQQKPGKVPKLLIYYTSRLHSGVPSRFSGSGSGTDFTLTISSLQPEDVATYYCVQYAQFPLTFGCGTKVEIKSGGGGSEVQLVESGGGLVQPGGSLKLSCAASGFTFNKYAINWVREAPGKGLEWVARIRSKYNNYATYYADAVKDRFTISRDDSKNTAYLQMNNLKTEDTAVYYCVRNANFGTSYISYFAYWGQGTLVTVSSGGGGSGGGGSGGGGSQTVVTQEPSLTVSPGGTVTLTCGSSTGAVTSGNYPNWVQKKPGQAPRGLIGGTKFLAPGTPARFSGSLLGGKAALTLSGVQPEDEAEYYCVLWYSNRWVFGSGTKLTVLGGGGDKTHTCPPCPAPELLGGPSVFLFPPKPKDTLMISRTPEVTCVVVDVSHEDPEVKFNWYVDGVEVHNAKTKPCEEQYGSTYRCVSVLTVLHQDWLNGKEYKCKVSNKALPAPIEKTISKAKGQPREPQVYTLPPSREEMTKNQVSLTCLVKGFYPSDIAVEWESNGQPENNYKTTPPVLDSDGSFFLYSKLTVDKSRWQQGNVFSCSVMHEALHNHYTQKSLSLSPGKGGGGSGGGGSGGGGSGGGGSGGGGSGGGGSDKTHTCPPCPAPELLGGPSVFLFPPKPKDTLMISRTPEVTCVVVDVSHEDPEVKFNWYVDGVEVHNAKTKPCEEQYGSTYRCVSVLTVLHQDWLNGKEYKCKVSNKALPAPIEKTISKAKGQPREPQVYTLPPSREEMTKNQVSLTCLVKGFYPSDIAVEWESNGQPENNYKTTPPVLDSDGSFFLYSKLTVDKSRWQQGNVFSCSVMHEALHNHYTQKSLSLSPGKGGGGQVQLQESGPGLVKPSETLSLTCTVSGGSISSSSYFWGWIRQPPGKCLEWIGNIYYSGSSNYNPSLKSRVTISVDTSKNQFSLKLSSVTAADTAVYYCARLPRGDRDAFDIWGQGTMVTVSSGGGGSGGGGSGGGGSDIVMTQSPSSLSASVGDRVTITCRASQGISNYLAWYQQKPGKVPKLLIYAASTLQSGVPSRFSGSGSGTDFTLTISSLQPEDFATYYCQQSYSTPFTFGCGTKVEIKSGGGGSEVQLVESGGGLVQPGGSLKLSCAASGFTFNKYAINWVREAPGKGLEWVARIRSKYNNYATYYADAVKDRFTISRDDSKNTAYLQMNNLKTEDTAVYYCVRNANFGTSYISYFAYWGQGTLVTVSSGGGGSGGGGSGGGGSQTVVTQEPSLTVSPGGTVTLTCGSSTGAVTSGNYPNWVQKKPGQAPRGLIGGTKFLAPGTPARFSGSLLGGKAALTLSGVQPEDEAEYYCVLWYSNRWVFGSGTKLTVL

SEQ ID NO: 262 - protein, 1474 aa, Synthetic construct
QVQLVQSGAEVKKPGASVKVSCKASGYTFTNYWMNWVRQAPGQCLEWMGNIHSKAHGTNYNQKFQGRVTMTVDTSSSTAYMELSRLRSDDTAVYYCATRYFYVMDYWGQGTLVTVSSGGGGQGGGGQGGGGQDIQMTQSPSSLSASVGDRVTITCRASQDISNYLNWYQQKPGKVPKLLIYYTSRLHSGVPSRFSGSGSGTDFTLTISSLQPEDVATYYCVQYAQFPLTFGCGTKVEIKSGGGGQEVQLVESGGGLVQPGGSLKLSCAASGFTFNKYAINWVREAPGKGLEWVARIRSKYNNYATYYADAVKDRFTISRDDSKNTAYLQMNNLKTEDTAVYYCVRNANFGTSYISYFAYWGQGTLVTVSSGGGGQGGGGQGGGGQQTVVTQEPSLTVSPGGTVTLTCGSSTGAVTSGNYPNWVQKKPGQAPRGLIGGTKFLAPGTPARFSGSLLGGKAALTLSGVQPEDEAEYYCVLWYSNRWVFGSGTKLTVLGGGGCPPCPAPELLGGPSVFLFPPKPKDTLMISRTPEVTCVVVDVSHEEPEVKFNWYVDGVEVHNAKTKPCEEQYGSTYRCVSVLTVLHQDWLNGKEYKCKVSNKALPAPIEKTISKAKGQPREPQVYTLPPSREEMTKNQVSLTCLVKGFYPSDIAVEWESNGQPENNYKTTPPVLDSDGSFFLYSKLTVDKSRWQQGNVFSCSVMHEALHNHYTQKSLSLSPGKGGGGQGGGGQGGGGQGGGGQGGGGQGGGGQCPPCPAPELLGGPSVFLFPPKPKDTLMISRTPEVTCVVVDVSHEEPEVKFNWYVDGVEVHNAKTKPCEEQYGSTYRCVSVLTVLHQDWLNGKEYKCKVSNKALPAPIEKTISKAKGQPREPQVYTLPPSREEMTKNQVSLTCLVKGFYPSDIAVEWESNGQPENNYKTTPPVLDSDGSFFLYSKLTVDKSRWQQGNVFSCSVMHEALHNHYTQKSLSLSPGKGGGGQVQLQESGPGLVKPSETLSLTCTVSGGSISSSSYFWGWIRQPPGKCLEWIGNIYYSGSSNYNPSLKSRVTISVDTSKNQFSLKLSSVTAADTAVYYCARLPRGDRDAFDIWGQGTMVTVSSGGGGQGGGGQGGGGQDIVMTQSPSSLSASVGDRVTITCRASQGISNYLAWYQQKPGKVPKLLIYAASTLQSGVPSRFSGSGSGTDFTLTISSLQPEDFATYYCQQSYSTPFTFGCGTKVEIKSGGGGQEVQLVESGGGLVQPGGSLKLSCAASGFTFNKYAINWVREAPGKGLEWVARIRSKYNNYATYYADAVKDRFTISRDDSKNTAYLQMNNLKTEDTAVYYCVRNANFGTSYISYFAYWGQGTLVTVSSGGGGQGGGGQGGGGQQTVVTQEPSLTVSPGGTVTLTCGSSTGAVTSGNYPNWVQKKPGQAPRGLIGGTKFLAPGTPARFSGSLLGGKAALTLSGVQPEDEAEYYCVLWYSNRWVFGSGTKLTVL

SEQ ID NO: 263 - protein, 1496 aa, Synthetic construct
QVQLVQSGAEVKKPGASVKVSCKASGYTFTNYWMNWVRQAPGQCLEWMGNIHSKAHGTNYNQKFQGRVTMTVDTSSSTAYMELSRLRSDDTAVYYCATRYFYVMDYWGQGTLVTVSSGGGGQGGGGQGGGGQDIQMTQSPSSLSASVGDRVTITCRASQDISNYLNWYQQKPGKVPKLLIYYTSRLHSGVPSRFSGSGSGTDFTLTISSLQPEDVATYYCVQYAQFPLTFGCGTKVEIKSGGGGQEVQLVESGGGLVQPGGSLKLSCAASGFTFNKYAMNWVRQAPGKGMEWVARIRSKYNNYATYYADAVKDRFTISRDDSKNTLYLQMNNLKTEDTAVYYCVRAGNFGSSYISYFAYWGQGTLVTVSSGGGGQGGGGQGGGGQQTVVTQEPSLTVSPGGTVTITCGSSTGAVTSGNYPNWIQKKPGQAPRGLIGGTKFLAPGTPARFSGSLEGGKAALTLSGVQPEDEAEYYCVLYYSNRWVFGSGTKLTVLGGGGQGGGGQGGGGQCPPCPAPELLGGPSVFLFPPKPKDTLMISRTPEVTCVVVDVSHEEPEVKFNWYVDGVEVHNAKTKPCEEQYGSTYRCVSVLTVLHQDWLNGKEYKCKVSNKALPAPIEKTISKAKGQPREPQVYTLPPSREEMTKNQVSLTCLVKGFYPSDIAVEWESNGQPENNYKTTPPVLDSDGSFFLYSKLTVDKSRWQQGNVFSCSVMHEALHNHYTQKSLSLSPGKGGGGQGGGGQGGGGQGGGGQGGGGQGGGGQCPPCPAPELLGGPSVFLFPPKPKDTLMISRTPEVTCVVVDVSHEEPEVKFNWYVDGVEVHNAKTKPCEEQYGSTYRCVSVLTVLHQDWLNGKEYKCKVSNKALPAPIEKTISKAKGQPREPQVYTLPPSREEMTKNQVSLTCLVKGFYPSDIAVEWESNGQPENNYKTTPPVLDSDGSFFLYSKLTVDKSRWQQGNVFSCSVMHEALHNHYTQKSLSLSPGKGGGGQGGGGQGGGGQQVQLQESGPGLVKPSETLSLTCTVSGGSISSSSYFWGWIRQPPGKCLEWIGNIYYSGSSNYNPSLKSRVTISVDTSKNQFSLKLSSVTAADTAVYYCARLPRGDRDAFDIWGQGTMVTVSSGGGGQGGGGQGGGGQDIVMTQSPSSLSASVGDRVTITCRASQGISNYLAWYQQKPGKVPKLLIYAASTLQSGVPSRFSGSGSGTDFTLTISSLQPEDFATYYCQQSYSTPFTFGCGTKVEIKSGGGGQEVQLVESGGGLVQPGGSLKLSCAASGFTFNKYAMNWVRQAPGKGMEWVARIRSKYNNYATYYADAVKDRFTISRDDSKNTLYLQMNNLKTEDTAVYYCVRAGNFGSSYISYFAYWGQGTLVTVSSGGGGQGGGGQGGGGQQTVVTQEPSLTVSPGGTVTITCGSSTGAVTSGNYPNWIQKKPGQAPRGLIGGTKFLAPGTPARFSGSLEGGKAALTLSGVQPEDEAEYYCVLYYSNRWVFGSGTKLTVL

SEQ ID NO: 264 - protein, 1484 aa, Synthetic construct
QVQLVQSGAEVKKPGASVKVSCKASGYTFTNYWMNWVRQAPGQCLEWMGNIHSKAHGTNYNQKFQGRVTMTVDTSSSTAYMELSRLRSDDTAVYYCATRYFYVMDYWGQGTLVTVSSGGGGSGGGGSGGGGSDIQMTQSPSSLSASVGDRVTITCRASQDISNYLNWYQQKPGKVPKLLIYYTSRLHSGVPSRFSGSGSGTDFTLTISSLQPEDVATYYCVQYAQFPLTFGCGTKVEIKSGGGGSEVQLVESGGGLVQPGGSLKLSCAASGFTFNKYAMNWVRQAPGKGMEWVARIRSKYNNYATYYADAVKDRFTISRDDSKNTLYLQMNNLKTEDTAVYYCVRAGNFGSSYISYFAYWGQGTLVTVSSGGGGSGGGGSGGGGSQTVVTQEPSLTVSPGGTVTITCGSSTGAVTSGNYPNWIQKKPGQAPRGLIGGTKFLAPGTPARFSGSLEGGKAALTLSGVQPEDEAEYYCVLYYSNRWVFGSGTKLTVLGGGGDKTHTCPPCPAPELLGGPSVFLFPPKPKDTLMISRTPEVTCVVVDVSHEDPEVKFNWYVDGVEVHNAKTKPCEEQYGSTYRCVSVLTVLHQDWLNGKEYKCKVSNKALPAPIEKTISKAKGQPREPQVYTLPPSREEMTKNQVSLTCLVKGFYPSDIAVEWESNGQPENNYKTTPPVLDSDGSFFLYSKLTVDKSRWQQGNVFSCSVMHEALHNHYTQKSLSLSPGKGGGGSGGGGSGGGGSGGGGSGGGGSGGGGSDKTHTCPPCPAPELLGGPSVFLFPPKPKDTLMISRTPEVTCVVVDVSHEDPEVKFNWYVDGVEVHNAKTKPCEEQYGSTYRCVSVLTVLHQDWLNGKEYKCKVSNKALPAPIEKTISKAKGQPREPQVYTLPPSREEMTKNQVSLTCLVKGFYPSDIAVEWESNGQPENNYKTTPPVLDSDGSFFLYSKLTVDKSRWQQGNVFSCSVMHEALHNHYTQKSLSLSPGKGGGGQVQLQESGPGLVKPSETLSLTCTVSGGSISSSSYFWGWIRQPPGKCLEWIGNIYYSGSSNYNPSLKSRVTISVDTSKNQFSLKLSSVTAADTAVYYCARLPRGDRDAFDIWGQGTMVTVSSGGGGSGGGGSGGGGSDIVMTQSPSSLSASVGDRVTITCRASQGISNYLAWYQQKPGKVPKLLIYAASTLQSGVPSRFSGSGSGTDFTLTISSLQPEDFATYYCQQSYSTPFTFGCGTKVEIKSGGGGSEVQLVESGGGLVQPGGSLKLSCAASGFTFNKYAMNWVRQAPGKGMEWVARIRSKYNNYATYYADAVKDRFTISRDDSKNTLYLQMNNLKTEDTAVYYCVRAGNFGSSYISYFAYWGQGTLVTVSSGGGGSGGGGSGGGGSQTVVTQEPSLTVSPGGTVTITCGSSTGAVTSGNYPNWIQKKPGQAPRGLIGGTKFLAPGTPARFSGSLEGGKAALTLSGVQPEDEAEYYCVLYYSNRWVFGSGTKLTVL

SEQ ID NO: 265 - protein, 1496 aa, Synthetic construct
QVQLVQSGAEVKKPGASVKVSCKASGYTFTNYWMNWVRQAPGQCLEWMGNIHSKAHGTNYNQKFQGRVTMTVDTSSSTAYMELSRLRSDDTAVYYCATRYFYVMDYWGQGTLVTVSSGGGGQGGGGQGGGGQDIQMTQSPSSLSASVGDRVTITCRASQDISNYLNWYQQKPGKVPKLLIYYTSRLHSGVPSRFSGSGSGTDFTLTISSLQPEDVATYYCVQYAQFPLTFGCGTKVEIKSGGGGQEVQLVESGGGLVQPGGSLKLSCAASGFTFNKYAINWVREAPGKGLEWVARIRSKYNNYATYYADAVKDRFTISRDDSKNTAYLQMNNLKTEDTAVYYCVRNANFGTSYISYFAYWGQGTLVTVSSGGGGQGGGGQGGGGQQTVVTQEPSLTVSPGGTVTLTCGSSTGAVTSGNYPNWVQKKPGQAPRGLIGGTKFLAPGTPARFSGSLLGGKAALTLSGVQPEDEAEYYCVLWYSNRWVFGSGTKLTVLGGGGQGGGGQGGGGQCPPCPAPELLGGPSVFLFPPKPKDTLMISRTPEVTCVVVDVSHEEPEVKFNWYVDGVEVHNAKTKPCEEQYGSTYRCVSVLTVLHQDWLNGKEYKCKVSNKALPAPIEKTISKAKGQPREPQVYTLPPSREEMTKNQVSLTCLVKGFYPSDIAVEWESNGQPENNYKTTPPVLDSDGSFFLYSKLTVDKSRWQQGNVFSCSVMHEALHNHYTQKSLSLSPGKGGGGQGGGGQGGGGQGGGGQGGGGQGGGGQCPPCPAPELLGGPSVFLFPPKPKDTLMISRTPEVTCVVVDVSHEEPEVKFNWYVDGVEVHNAKTKPCEEQYGSTYRCVSVLTVLHQDWLNGKEYKCKVSNKALPAPIEKTISKAKGQPREPQVYTLPPSREEMTKNQVSLTCLVKGFYPSDIAVEWESNGQPENNYKTTPPVLDSDGSFFLYSKLTVDKSRWQQGNVFSCSVMHEALHNHYTQKSLSLSPGKGGGGQGGGGQGGGGQQVQLQESGPGLVKPSETLSLTCTVSGGSISSSSYFWGWIRQPPGKCLEWIGNIYYSGSSNYNPSLKSRVTISVDTSKNQFSLKLSSVTAADTAVYYCARLPRGDRDAFDIWGQGTMVTVSSGGGGQGGGGQGGGGQDIVMTQSPSSLSASVGDRVTITCRASQGISNYLAWYQQKPGKVPKLLIYAASTLQSGVPSRFSGSGSGTDFTLTISSLQPEDFATYYCQQSYSTPFTFGCGTKVEIKSGGGGQEVQLVESGGGLVQPGGSLKLSCAASGFTFNKYAINWVREAPGKGLEWVARIRSKYNNYATYYADAVKDRFTISRDDSKNTAYLQMNNLKTEDTAVYYCVRNANFGTSYISYFAYWGQGTLVTVSSGGGGQGGGGQGGGGQQTVVTQEPSLTVSPGGTVTLTCGSSTGAVTSGNYPNWVQKKPGQAPRGLIGGTKFLAPGTPARFSGSLLGGKAALTLSGVQPEDEAEYYCVLWYSNRWVFGSGTKLTVL

SEQ ID NO: 266 - protein, 1506 aa, Synthetic construct
QVQLVQSGAEVKKPGASVKVSCKASGYTFTNYWMNWVRQAPGQCLEWMGNIHSKAHGTNYNQKFQGRVTMTVDTSSSTAYMELSRLRSDDTAVYYCATRYFYVMDYWGQGTLVTVSSGGGGSGGGGSGGGGSDIQMTQSPSSLSASVGDRVTITCRASQDISNYLNWYQQKPGKVPKLLIYYTSRLHSGVPSRFSGSGSGTDFTLTISSLQPEDVATYYCVQYAQFPLTFGCGTKVEIKSGGGGSEVQLVESGGGLVQPGGSLKLSCAASGFTFNKYAINWVREAPGKGLEWVARIRSKYNNYATYYADAVKDRFTISRDDSKNTAYLQMNNLKTEDTAVYYCVRNANFGTSYISYFAYWGQGTLVTVSSGGGGSGGGGSGGGGSQTVVTQEPSLTVSPGGTVTLTCGSSTGAVTSGNYPNWVQKKPGQAPRGLIGGTKFLAPGTPARFSGSLLGGKAALTLSGVQPEDEAEYYCVLWYSNRWVFGSGTKLTVLGGGGSGGGGSGGGGSDKTHTCPPCPAPELLGGPSVFLFPPKPKDTLMISRTPEVTCVVVDVSHEDPEVKFNWYVDGVEVHNAKTKPCEEQYGSTYRCVSVLTVLHQDWLNGKEYKCKVSNKALPAPIEKTISKAKGQPREPQVYTLPPSREEMTKNQVSLTCLVKGFYPSDIAVEWESNGQPENNYKTTPPVLDSDGSFFLYSKLTVDKSRWQQGNVFSCSVMHEALHNHYTQKSLSLSPGKGGGGSGGGGSGGGGSGGGGSGGGGSGGGGSDKTHTCPPCPAPELLGGPSVFLFPPKPKDTLMISRTPEVTCVVVDVSHEDPEVKFNWYVDGVEVHNAKTKPCEEQYGSTYRCVSVLTVLHQDWLNGKEYKCKVSNKALPAPIEKTISKAKGQPREPQVYTLPPSREEMTKNQVSLTCLVKGFYPSDIAVEWESNGQPENNYKTTPPVLDSDGSFFLYSKLTVDKSRWQQGNVFSCSVMHEALHNHYTQKSLSLSPGKGGGGSGGGGSGGGGSQVQLQESGPGLVKPSETLSLTCTVSGGSISSSSYFWGWIRQPPGKCLEWIGNIYYSGSSNYNPSLKSRVTISVDTSKNQFSLKLSSVTAADTAVYYCARLPRGDRDAFDIWGQGTMVTVSSGGGGSGGGGSGGGGSDIVMTQSPSSLSASVGDRVTITCRASQGISNYLAWYQQKPGKVPKLLIYAASTLQSGVPSRFSGSGSGTDFTLTISSLQPEDFATYYCQQSYSTPFTFGCGTKVEIKSGGGGSEVQLVESGGGLVQPGGSLKLSCAASGFTFNKYAINWVREAPGKGLEWVARIRSKYNNYATYYADAVKDRFTISRDDSKNTAYLQMNNLKTEDTAVYYCVRNANFGTSYISYFAYWGQGTLVTVSSGGGGSGGGGSGGGGSQTVVTQEPSLTVSPGGTVTLTCGSSTGAVTSGNYPNWVQKKPGQAPRGLIGGTKFLAPGTPARFSGSLLGGKAALTLSGVQPEDEAEYYCVLWYSNRWVFGSGTKLTVL

SEQ ID NO: 267 - protein, 1510 aa, Synthetic construct
QVQLVQSGAEVKKPGASVKVSCKASGYTFTNYWMNWVRQAPGQCLEWMGNIHSKAHGTNYNQKFQGRVTMTVDTSSSTAYMELSRLRSDDTAVYYCATRYFYVMDYWGQGTLVTVSSGGGGSGGGGSGGGGSDIQMTQSPSSLSASVGDRVTITCRASQDISNYLNWYQQKPGKVPKLLIYYTSRLHSGVPSRFSGSGSGTDFTLTISSLQPEDVATYYCVQYAQFPLTFGCGTKVEIKSGGGGSEVQLVESGGGLVQPGGSLKLSCAASGFTFNKYAMNWVRQAPGKGMEWVARIRSKYNNYATYYADAVKDRFTISRDDSKNTLYLQMNNLKTEDTAVYYCVRAGNFGSSYISYFAYWGQGTLVTVSSGGGGSGGGGSGGGGSQTVVTQEPSLTVSPGGTVTITCGSSTGAVTSGNYPNWIQKKPGQAPRGLIGGTKFLAPGTPARFSGSLEGGKAALTLSGVQPEDEAEYYCVLYYSNRWVFGSGTKLTVLGGGGSGGGGSGGGGSDKTHTCPPCPAPELLGGPSVFLFPPKPKDTLMISRTPEVTCVVVDVSHEDPEVKFNWYVDGVEVHNAKTKPCEEQYGSTYRCVSVLTVLHQDWLNGKEYKCKVSNKALPAPIEKTISKAKGQPREPQVYTLPPSREEMTKNQVSLTCLVKGFYPSDIAVEWESNGQPENNYKTTPPVLDSDGSFFLYSKLTVDKSRWQQGNVFSCSVMHEALHNHYTQKSLSLSPGKGGGGSGGGGSGGGGSGGGGSGGGGSGGGGSDKTHTCPPCPAPELLGGPSVFLFPPKPKDTLMISRTPEVTCVVVDVSHEDPEVKFNWYVDGVEVHNAKTKPCEEQYGSTYRCVSVLTVLHQDWLNGKEYKCKVSNKALPAPIEKTISKAKGQPREPQVYTLPPSREEMTKNQVSLTCLVKGFYPSDIAVEWESNGQPENNYKTTPPVLDSDGSFFLYSKLTVDKSRWQQGNVFSCSVMHEALHNHYTQKSLSLSPGKGGGGSGGGGSGGGGSQVQLVQSGAEVKKPGASVKVSCKASGYTFTGYYIHWVRQAPGQCLEWMGWINPNSGGTNYAQKFQGRVTMTRDTSISTAYMELSRLRSDDTAVYYCARVEAVAGREYYYFSGMDVWGQGTTVTVSSGGGGSGGGGSGGGGSSYELTQPPSVSVSPGQTASITCSGEKLGDKYVYWYQQKPGQSPVLVIYQSTKRPSGVPERFSGSNSGNTATLTISGTQAMDEADYYCQAYHASTAVFGCGTKLTVLSGGGGSEVQLVESGGGLVQPGGSLKLSCAASGFTFNKYAMNWVRQAPGKGMEWVARIRSKYNNYATYYADAVKDRFTISRDDSKNTLYLQMNNLKTEDTAVYYCVRAGNFGSSYISYFAYWGQGTLVTVSSGGGGSGGGGSGGGGSQTVVTQEPSLTVSPGGTVTITCGSSTGAVTSGNYPNWIQKKPGQAPRGLIGGTKFLAPGTPARFSGSLEGGKAALTLSGVQPEDEAEYYCVLYYSNRWVFGSGTKLTVL

SEQ ID NO: 268 - protein, 1509 aa, Synthetic construct
EVQLLESGGGLVQPGGSVRLSCAASGFTFSSYWMYWVRQAPGKCLEWVSKIDPSDDYTNYNQKVKGRFTISIDNSKNTLYLQMNSLRAEDSAVYYCARWDYTHFDVWGQGTTVTVSSGGGGSGGGGSGGGGSEIVMTQSPATLSVSPGERATLSCRASSSVSYMHWYQQKPGQAPRLLIYGTSNLASGVPVRFSGSGSGTEFTLTISRLQSEDVAVYYCQQWSSYPLTFGCGTKVEIKSGGGGSEVQLVESGGGLVQPGGSLKLSCAASGFTFNKYAMNWVRQAPGKCLEWVARIRSKYNNYATYYADSVKDRFTISRDDSKNTAYLQMNNLKTEDTAVYYCVRHGNFGNSYISYWAYWGQGTLVTVSSGGGGSGGGGSGGGGSQTVVTQEPSLTVSPGGTVTLTCGSSTGAVTSGNYPNWVQQKPGQAPRGLIGGTKFLAPGTPARFSGSLLGGKAALTLSGVQPEDEAEYYCVLWYSNRWVFGCGTKLTVLGGGGSGGGGSGGGGSDKTHTCPPCPAPELLGGPSVFLFPPKPKDTLMISRTPEVTCVVVDVSHEDPEVKFNWYVDGVEVHNAKTKPCEEQYGSTYRCVSVLTVLHQDWLNGKEYKCKVSNKALPAPIEKTISKAKGQPREPQVYTLPPSREEMTKNQVSLTCLVKGFYPSDIAVEWESNGQPENNYKTTPPVLDSDGSFFLYSKLTVDKSRWQQGNVFSCSVMHEALHNHYTQKSLSLSPGKGGGGSGGGGSGGGGSGGGGSGGGGSGGGGSDKTHTCPPCPAPELLGGPSVFLFPPKPKDTLMISRTPEVTCVVVDVSHEDPEVKFNWYVDGVEVHNAKTKPCEEQYGSTYRCVSVLTVLHQDWLNGKEYKCKVSNKALPAPIEKTISKAKGQPREPQVYTLPPSREEMTKNQVSLTCLVKGFYPSDIAVEWESNGQPENNYKTTPPVLDSDGSFFLYSKLTVDKSRWQQGNVFSCSVMHEALHNHYTQKSLSLSPGKGGGGSGGGGSGGGGSQVQLVQSGAEVKKPGASVKVSCKASGYTFTGYYIHWVRQAPGQCLEWMGWINPNSGGTNYAQKFQGRVTMTRDTSISTAYMELSRLRSDDTAVYYCARVEAVAGREYYYFSGMDVWGQGTTVTVSSGGGGSGGGGSGGGGSSYELTQPPSVSVSPGQTASITCSGEKLGDKYVYWYQQKPGQSPVLVIYQSTKRPSGVPERFSGSNSGNTATLTISGTQAMDEADYYCQAYHASTAVFGCGTKLTVLSGGGGSEVQLVESGGGLVQPGGSLKLSCAASGFTFNKYAMNWVRQAPGKCLEWVARIRSKYNNYATYYADSVKDRFTISRDDSKNTAYLQMNNLKTEDTAVYYCVRHGNFGNSYISYWAYWGQGTLVTVSSGGGGSGGGGSGGGGSQTVVTQEPSLTVSPGGTVTLTCGSSTGAVTSGNYPNWVQQKPGQAPRGLIGGTKFLAPGTPARFSGSLLGGKAALTLSGVQPEDEAEYYCVLWYSNRWVFGCGTKLTVL

SEQ ID NO: 269 - protein, 1509 aa, Synthetic construct
EVQLLESGGGLVQPGGSVRLSCAASGFTFSSYWMYWVRQAPGKCLEWVSKIDPSDDYTNYNQKVKGRFTISIDNSKNTLYLQMNSLRAEDSAVYYCARWDYTHFDVWGQGTTVTVSSGGGGSGGGGSGGGGSEIVMTQSPATLSVSPGERATLSCRASSSVSYMHWYQQKPGQAPRLLIYGTSNLASGVPVRFSGSGSGTEFTLTISRLQSEDVAVYYCQQWSSYPLTFGCGTKVEIKSGGGGSEVQLVESGGGLVQPGGSLKLSCAASGFTFNKYAMNWVRQAPGKGMEWVARIRSKYNNYATYYADAVKDRFTISRDDSKNTLYLQMNNLKTEDTAVYYCVRAGNFGSSYISYFAYWGQGTLVTVSSGGGGSGGGGSGGGGSQTVVTQEPSLTVSPGGTVTITCGSSTGAVTSGNYPNWIQKKPGQAPRGLIGGTKFLAPGTPARFSGSLEGGKAALTLSGVQPEDEAEYYCVLYYSNRWVFGSGTKLTVLGGGGSGGGGSGGGGSDKTHTCPPCPAPELLGGPSVFLFPPKPKDTLMISRTPEVTCVVVDVSHEDPEVKFNWYVDGVEVHNAKTKPCEEQYGSTYRCVSVLTVLHQDWLNGKEYKCKVSNKALPAPIEKTISKAKGQPREPQVYTLPPSREEMTKNQVSLTCLVKGFYPSDIAVEWESNGQPENNYKTTPPVLDSDGSFFLYSKLTVDKSRWQQGNVFSCSVMHEALHNHYTQKSLSLSPGKGGGGSGGGGSGGGGSGGGGSGGGGSGGGGSDKTHTCPPCPAPELLGGPSVFLFPPKPKDTLMISRTPEVTCVVVDVSHEDPEVKFNWYVDGVEVHNAKTKPCEEQYGSTYRCVSVLTVLHQDWLNGKEYKCKVSNKALPAPIEKTISKAKGQPREPQVYTLPPSREEMTKNQVSLTCLVKGFYPSDIAVEWESNGQPENNYKTTPPVLDSDGSFFLYSKLTVDKSRWQQGNVFSCSVMHEALHNHYTQKSLSLSPGKGGGGSGGGGSGGGGSQVQLVQSGAEVKKPGASVKVSCKASGYTFTGYYIHWVRQAPGQCLEWMGWINPNSGGTNYAQKFQGRVTMTRDTSISTAYMELSRLRSDDTAVYYCARVEAVAGREYYYFSGMDVWGQGTTVTVSSGGGGSGGGGSGGGGSSYELTQPPSVSVSPGQTASITCSGEKLGDKYVYWYQQKPGQSPVLVIYQSTKRPSGVPERFSGSNSGNTATLTISGTQAMDEADYYCQAYHASTAVFGCGTKLTVLSGGGGSEVQLVESGGGLVQPGGSLKLSCAASGFTFNKYAMNWVRQAPGKGMEWVARIRSKYNNYATYYADAVKDRFTISRDDSKNTLYLQMNNLKTEDTAVYYCVRAGNFGSSYISYFAYWGQGTLVTVSSGGGGSGGGGSGGGGSQTVVTQEPSLTVSPGGTVTITCGSSTGAVTSGNYPNWIQKKPGQAPRGLIGGTKFLAPGTPARFSGSLEGGKAALTLSGVQPEDEAEYYCVLYYSNRWVFGSGTKLTVL

SEQ ID NO: 270 - protein, 1487 aa, Synthetic construct
EVQLLESGGGLVQPGGSVRLSCAASGFTFSSYWMYWVRQAPGKCLEWVSKIDPSDDYTNYNQKVKGRFTISIDNSKNTLYLQMNSLRAEDSAVYYCARWDYTHFDVWGQGTTVTVSSGGGGSGGGGSGGGGSEIVMTQSPATLSVSPGERATLSCRASSSVSYMHWYQQKPGQAPRLLIYGTSNLASGVPVRFSGSGSGTEFTLTISRLQSEDVAVYYCQQWSSYPLTFGCGTKVEIKSGGGGSEVQLVESGGGLVQPGGSLKLSCAASGFTFNKYAMNWVRQAPGKCLEWVARIRSKYNNYATYYADSVKDRFTISRDDSKNTAYLQMNNLKTEDTAVYYCVRHGNFGNSYISYWAYWGQGTLVTVSSGGGGSGGGGSGGGGSQTVVTQEPSLTVSPGGTVTLTCGSSTGAVTSGNYPNWVQQKPGQAPRGLIGGTKFLAPGTPARFSGSLLGGKAALTLSGVQPEDEAEYYCVLWYSNRWVFGCGTKLTVLGGGGDKTHTCPPCPAPELLGGPSVFLFPPKPKDTLMISRTPEVTCVVVDVSHEDPEVKFNWYVDGVEVHNAKTKPCEEQYGSTYRCVSVLTVLHQDWLNGKEYKCKVSNKALPAPIEKTISKAKGQPREPQVYTLPPSREEMTKNQVSLTCLVKGFYPSDIAVEWESNGQPENNYKTTPPVLDSDGSFFLYSKLTVDKSRWQQGNVFSCSVMHEALHNHYTQKSLSLSPGKGGGGSGGGGSGGGGSGGGGSGGGGSGGGGSDKTHTCPPCPAPELLGGPSVFLFPPKPKDTLMISRTPEVTCVVVDVSHEDPEVKFNWYVDGVEVHNAKTKPCEEQYGSTYRCVSVLTVLHQDWLNGKEYKCKVSNKALPAPIEKTISKAKGQPREPQVYTLPPSREEMTKNQVSLTCLVKGFYPSDIAVEWESNGQPENNYKTTPPVLDSDGSFFLYSKLTVDKSRWQQGNVFSCSVMHEALHNHYTQKSLSLSPGKGGGGQVQLVQSGAEVKKPGASVKVSCKASGYTFTGYYIHWVRQAPGQCLEWMGWINPNSGGTNYAQKFQGRVTMTRDTSISTAYMELSRLRSDDTAVYYCARVEAVAGREYYYFSGMDVWGQGTTVTVSSGGGGSGGGGSGGGGSSYELTQPPSVSVSPGQTASITCSGEKLGDKYVYWYQQKPGQSPVLVIYQSTKRPSGVPERFSGSNSGNTATLTISGTQAMDEADYYCQAYHASTAVFGCGTKLTVLSGGGGSEVQLVESGGGLVQPGGSLKLSCAASGFTFNKYAMNWVRQAPGKCLEWVARIRSKYNNYATYYADSVKDRFTISRDDSKNTAYLQMNNLKTEDTAVYYCVRHGNFGNSYISYWAYWGQGTLVTVSSGGGGSGGGGSGGGGSQTVVTQEPSLTVSPGGTVTLTCGSSTGAVTSGNYPNWVQQKPGQAPRGLIGGTKFLAPGTPARFSGSLLGGKAALTLSGVQPEDEAEYYCVLWYSNRWVFGCGTKLTVL

SEQ ID NO: 271 - protein, 1509 aa, Synthetic construct
EVQLLESGGGLVQPGGSLRLSCAASGFTFSSYWMHWVRQTPGKCLEWVSKIDPSDDYTNYNQKVKGRFTISIDKSKNTLYLQMNSLRAEDTAVYYCARWDYSHFDVWGQGTTVTVSSGGGGSGGGGSGGGGSEIVMTQSPATLSVSPGERATLTCRASSSVSYMHWYQQKPGQAPRLLIYGTSNLVSGVPARFSGSGSGTEFTLTISSLQSEDFAVYYCQQWSSYPLTFGCGTKVEIKSGGGGSEVQLVESGGGLVQPGGSLKLSCAASGFTFNKYAMNWVRQAPGKCLEWVARIRSKYNNYATYYADSVKDRFTISRDDSKNTAYLQMNNLKTEDTAVYYCVRHGNFGNSYISYWAYWGQGTLVTVSSGGGGSGGGGSGGGGSQTVVTQEPSLTVSPGGTVTLTCGSSTGAVTSGNYPNWVQQKPGQAPRGLIGGTKFLAPGTPARFSGSLLGGKAALTLSGVQPEDEAEYYCVLWYSNRWVFGCGTKLTVLGGGGSGGGGSGGGGSDKTHTCPPCPAPELLGGPSVFLFPPKPKDTLMISRTPEVTCVVVDVSHEDPEVKFNWYVDGVEVHNAKTKPCEEQYGSTYRCVSVLTVLHQDWLNGKEYKCKVSNKALPAPIEKTISKAKGQPREPQVYTLPPSREEMTKNQVSLTCLVKGFYPSDIAVEWESNGQPENNYKTTPPVLDSDGSFFLYSKLTVDKSRWQQGNVFSCSVMHEALHNHYTQKSLSLSPGKGGGGSGGGGSGGGGSGGGGSGGGGSGGGGSDKTHTCPPCPAPELLGGPSVFLFPPKPKDTLMISRTPEVTCVVVDVSHEDPEVKFNWYVDGVEVHNAKTKPCEEQYGSTYRCVSVLTVLHQDWLNGKEYKCKVSNKALPAPIEKTISKAKGQPREPQVYTLPPSREEMTKNQVSLTCLVKGFYPSDIAVEWESNGQPENNYKTTPPVLDSDGSFFLYSKLTVDKSRWQQGNVFSCSVMHEALHNHYTQKSLSLSPGKGGGGSGGGGSGGGGSQVQLVQSGAEVKKPGASVKVSCKASGYTFTGYYIHWVRQAPGQCLEWMGWINPNSGGTNYAQKFQGRVTMTRDTSISTAYMELSRLRSDDTAVYYCARVEAVAGREYYYFSGMDVWGQGTTVTVSSGGGGSGGGGSGGGGSSYELTQPPSVSVSPGQTASITCSGEKLGDKYVYWYQQKPGQSPVLVIYQSTKRPSGVPERFSGSNSGNTATLTISGTQAMDEADYYCQAYHASTAVFGCGTKLTVLSGGGGSEVQLVESGGGLVQPGGSLKLSCAASGFTFNKYAMNWVRQAPGKCLEWVARIRSKYNNYATYYADSVKDRFTISRDDSKNTAYLQMNNLKTEDTAVYYCVRHGNFGNSYISYWAYWGQGTLVTVSSGGGGSGGGGSGGGGSQTVVTQEPSLTVSPGGTVTLTCGSSTGAVTSGNYPNWVQQKPGQAPRGLIGGTKFLAPGTPARFSGSLLGGKAALTLSGVQPEDEAEYYCVLWYSNRWVFGCGTKLTVL

SEQ ID NO: 272 - protein, 1513 aa, Synthetic construct
QVQLVESGGGLVKPGGSLRLSCAASGFTFSDYYMTWIRQAPGKCLEWLSYISSSGSTIYYAEAVKGRFTISRDNAKNSLFLQMNSLRAEDTAVYYCARDRNSHFDYWGQGTLVTVSSGGGGSGGGGSGGGGSDIMTQSPSSVSASVGDRVTITCRASQGIRTWLAWYQQKPGKAPKLLIYGASGLQSGVPSRFSGSGSGTDFTLTISSLQPEDFATYYCQQAESFPRTFGCGTKVEIKSGGGGSEVQLVESGGGLVQPGGSLKLSCAASGFTFNKYAMNWVRQAPGKGMEWVARIRSKYNNYATYYADAVKDRFTISRDDSKNTLYLQMNNLKTEDTAVYYCVRAGNFGSSYISYFAYWGQGTLVTVSSGGGGSGGGGSGGGGSQTVVTQEPSLTVSPGGTVTITCGSSTGAVTSGNYPNWIQKKPGQAPRGLIGGTKFLAPGTPARFSGSLEGGKAALTLSGVQPEDEAEYYCVLYYSNRWVFGSGTKLTVLGGGGSGGGGSGGGGSDKTHTCPPCPAPELLGGPSVFLFPPKPKDTLMISRTPEVTCVVVDVSHEDPEVKFNWYVDGVEVHNAKTKPCEEQYGSTYRCVSVLTVLHQDWLNGKEYKCKVSNKALPAPIEKTISKAKGQPREPQVYTLPPSREEMTKNQVSLTCLVKGFYPSDIAVEWESNGQPENNYKTTPPVLDSDGSFFLYSKLTVDKSRWQQGNVFSCSVMHEALHNHYTQKSLSLSPGKGGGGSGGGGSGGGGSGGGGSGGGGSGGGGSDKTHTCPPCPAPELLGGPSVFLFPPKPKDTLMISRTPEVTCVVVDVSHEDPEVKFNWYVDGVEVHNAKTKPCEEQYGSTYRCVSVLTVLHQDWLNGKEYKCKVSNKALPAPIEKTISKAKGQPREPQVYTLPPSREEMTKNQVSLTCLVKGFYPSDIAVEWESNGQPENNYKTTPPVLDSDGSFFLYSKLTVDKSRWQQGNVFSCSVMHEALHNHYTQKSLSLSPGKGGGGSGGGGSGGGGSEVQLLESGGGLVQPGGSLRLSCAASGFSFSSYPINWVRQAPGKCLEWVGVIWTGGGTNYASSVKGRFTISRDNSKNTVYLQMNSLRAEDTAVYYCAKSRGVYDFKGRGAMDYWGQGTLVTVSSGGGGSGGGGSGGGGSDIVMTQSPDSLAVSLGERATINCKSSQSLLYSSNQKNYFAWYQQKPGQPPKLLIYWASTRESGVPDRFSGSGSGTDFTLTISSLQAEDVAVYYCQQYYSYPYTFGCGTKLEIKSGGGGSEVQLVESGGGLVQPGGSLKLSCAASGFTFNKYAMNWVRQAPGKGMEWVARIRSKYNNYATYYADAVKDRFTISRDDSKNTLYLQMNNLKTEDTAVYYCVRAGNFGSSYISYFAYWGQGTLVTVSSGGGGSGGGGSGGGGSQTVVTQEPSLTVSPGGTVTITCGSSTGAVTSGNYPNWIQKKPGQAPRGLIGGTKFLAPGTPARFSGSLEGGKAALTLSGVQPEDEAEYYCVLYYSNRWVFGSGTKLTVL

SEQ ID NO: 273 - protein, 1500 aa, Synthetic construct
QVQLQESGPGLVKPSETLSLTCTVSGGSISSSSYFWGWIRQPPGKCLEWIGNIYYSGSSNYNPSLKSRVTISVDTSKNQFSLKLSSVTAADTAVYYCARLPRGDRDAFDIWGQGTMVTVSSGGGGQGGGGQGGGGQDIVMTQSPSSLSASVGDRVTITCRASQGISNYLAWYQQKPGKVPKLLIYAASTLQSGVPSRFSGSGSGTDFTLTISSLQPEDFATYYCQQSYSTPFTFGCGTKVEIKSGGGGQEVQLVESGGGLVQPGGSLKLSCAASGFTFNKYAMNWVRQAPGKGMEWVARIRSKYNNYATYYADAVKDRFTISRDDSKNTLYLQMNNLKTEDTAVYYCVRAGNFGSSYISYFAYWGQGTLVTVSSGGGGQGGGGQGGGGQQTVVTQEPSLTVSPGGTVTITCGSSTGAVTSGNYPNWIQKKPGQAPRGLIGGTKFLAPGTPARFSGSLEGGKAALTLSGVQPEDEAEYYCVLYYSNRWVFGSGTKLTVLGGGGQGGGGQGGGGQCPPCPAPELLGGPSVFLFPPKPKDTLMISRTPEVTCVVVDVSHEEPEVKFNWYVDGVEVHNAKTKPCEEQYGSTYRCVSVLTVLHQDWLNGKEYKCKVSNKALPAPIEKTISKAKGQPREPQVYTLPPSREEMTKNQVSLTCLVKGFYPSDIAVEWESNGQPENNYKTTPPVLDSDGSFFLYSKLTVDKSRWQQGNVFSCSVMHEALHNHYTQKSLSLSPGKGGGGQGGGGQGGGGQGGGGQGGGGQGGGGQCPPCPAPELLGGPSVFLFPPKPKDTLMISRTPEVTCVVVDVSHEEPEVKFNWYVDGVEVHNAKTKPCEEQYGSTYRCVSVLTVLHQDWLNGKEYKCKVSNKALPAPIEKTISKAKGQPREPQVYTLPPSREEMTKNQVSLTCLVKGFYPSDIAVEWESNGQPENNYKTTPPVLDSDGSFFLYSKLTVDKSRWQQGNVFSCSVMHEALHNHYTQKSLSLSPGKGGGGQGGGGQGGGGQQVQLVQSGAEVVKPGASVKVSCKASGYTFTSSWMNWVRQAPGQCLEWMGRIYTGTGETKYSGKFQGRVTITRDTSASTAYMELSSLTSEDTAVYYCARQRDYGALYAMDYWGQGTLVTVSSGGGGQGGGGQGGGGQDIQLTQSPSFLSASVGDRVTITCRASDDIYSYLAWYQQKPGKAPKLLVYNAKTLAEGVPSRFSGSGSGTEFTLTISSLQPEDFATYYCQNHDRTPFTFGCGTKVDIKSGGGGQEVQLVESGGGLVQPGGSLKLSCAASGFTFNKYAMNWVRQAPGKGMEWVARIRSKYNNYATYYADAVKDRFTISRDDSKNTLYLQMNNLKTEDTAVYYCVRAGNFGSSYISYFAYWGQGTLVTVSSGGGGQGGGGQGGGGQQTVVTQEPSLTVSPGGTVTITCGSSTGAVTSGNYPNWIQKKPGQAPRGLIGGTKFLAPGTPARFSGSLEGGKAALTLSGVQPEDEAEYYCVLYYSNRWVFGSGTKLTVL

SEQ ID NO: 274 - protein, 1496 aa, Synthetic construct
QVQLQESGPGLVKPSETLSLTCTVSGGSISSSSYFWGWIRQPPGKCLEWIGNIYYSGSSNYNPSLKSRVTISVDTSKNQFSLKLSSVTAADTAVYYCARLPRGDRDAFDIWGQGTMVTVSSGGGGQGGGGQGGGGQDIVMTQSPSSLSASVGDRVTITCRASQGISNYLAWYQQKPGKVPKLLIYAASTLQSGVPSRFSGSGSGTDFTLTISSLQPEDFATYYCQQSYSTPFTFGCGTKVEIKSGGGGQEVQLVESGGGLVQPGGSLKLSCAASGFTFNKYAMNWVRQAPGKGMEWVARIRSKYNNYATYYADAVKDRFTISRDDSKNTLYLQMNNLKTEDTAVYYCVRAGNFGSSYISYFAYWGQGTLVTVSSGGGGQGGGGQGGGGQQTVVTQEPSLTVSPGGTVTITCGSSTGAVTSGNYPNWIQKKPGQAPRGLIGGTKFLAPGTPARFSGSLEGGKAALTLSGVQPEDEAEYYCVLYYSNRWVFGSGTKLTVLGGGGQGGGGQGGGGQCPPCPAPELLGGPSVFLFPPKPKDTLMISRTPEVTCVVVDVSHEEPEVKFNWYVDGVEVHNAKTKPCEEQYGSTYRCVSVLTVLHQDWLNGKEYKCKVSNKALPAPIEKTISKAKGQPREPQVYTLPPSREEMTKNQVSLTCLVKGFYPSDIAVEWESNGQPENNYKTTPPVLDSDGSFFLYSKLTVDKSRWQQGNVFSCSVMHEALHNHYTQKSLSLSPGKGGGGQGGGGQGGGGQGGGGQGGGGQGGGGQCPPCPAPELLGGPSVFLFPPKPKDTLMISRTPEVTCVVVDVSHEEPEVKFNWYVDGVEVHNAKTKPCEEQYGSTYRCVSVLTVLHQDWLNGKEYKCKVSNKALPAPIEKTISKAKGQPREPQVYTLPPSREEMTKNQVSLTCLVKGFYPSDIAVEWESNGQPENNYKTTPPVLDSDGSFFLYSKLTVDKSRWQQGNVFSCSVMHEALHNHYTQKSLSLSPGKGGGGQGGGGQGGGGQQVQLVQSGAEVKKPGASVKVSCKASGYTFTNYWMNWVRQAPGQCLEWMGNIAYGVKGTNYNQKFQGRVTMTVDTSSSTAYMELSRLRSDDTAVYYCATRYFYVMDYWGQGTLVTVSSGGGGQGGGGQGGGGQDIQMTQSPSSLSASVGDRVTITCRASQDISNYLNWYQQKPGKVPKLLIYYTSRLHSGVPSRFSGSGSGTDFTLTISSLQPEDVATYYCVQYAQFPLTFGCGTKVEIKSGGGGQEVQLVESGGGLVQPGGSLKLSCAASGFTFNKYAMNWVRQAPGKGMEWVARIRSKYNNYATYYADAVKDRFTISRDDSKNTLYLQMNNLKTEDTAVYYCVRAGNFGSSYISYFAYWGQGTLVTVSSGGGGQGGGGQGGGGQQTVVTQEPSLTVSPGGTVTITCGSSTGAVTSGNYPNWIQKKPGQAPRGLIGGTKFLAPGTPARFSGSLEGGKAALTLSGVQPEDEAEYYCVLYYSNRWVFGSGTKLTVL

SEQ ID NO: 275 - protein, 1474 aa, Synthetic construct
QVQLQESGPGLVKPSETLSLTCTVSGGSISSSSYFWGWIRQPPGKCLEWIGNIYYSGSSNYNPSLKSRVTISVDTSKNQFSLKLSSVTAADTAVYYCARLPRGDRDAFDIWGQGTMVTVSSGGGGQGGGGQGGGGQDIVMTQSPSSLSASVGDRVTITCRASQGISNYLAWYQQKPGKVPKLLIYAASTLQSGVPSRFSGSGSGTDFTLTISSLQPEDFATYYCQQSYSTPFTFGCGTKVEIKSGGGGQEVQLVESGGGLVQPGGSLKLSCAASGFTFNKYAMNWVRQAPGKGMEWVARIRSKYNNYATYYADAVKDRFTISRDDSKNTLYLQMNNLKTEDTAVYYCVRAGNFGSSYISYFAYWGQGTLVTVSSGGGGQGGGGQGGGGQQTVVTQEPSLTVSPGGTVTITCGSSTGAVTSGNYPNWIQKKPGQAPRGLIGGTKFLAPGTPARFSGSLEGGKAALTLSGVQPEDEAEYYCVLYYSNRWVFGSGTKLTVLGGGGCPPCPAPELLGGPSVFLFPPKPKDTLMISRTPEVTCVVVDVSHEEPEVKFNWYVDGVEVHNAKTKPCEEQYGSTYRCVSVLTVLHQDWLNGKEYKCKVSNKALPAPIEKTISKAKGQPREPQVYTLPPSREEMTKNQVSLTCLVKGFYPSDIAVEWESNGQPENNYKTTPPVLDSDGSFFLYSKLTVDKSRWQQGNVFSCSVMHEALHNHYTQKSLSLSPGKGGGGQGGGGQGGGGQGGGGQGGGGQGGGGQCPPCPAPELLGGPSVFLFPPKPKDTLMISRTPEVTCVVVDVSHEEPEVKFNWYVDGVEVHNAKTKPCEEQYGSTYRCVSVLTVLHQDWLNGKEYKCKVSNKALPAPIEKTISKAKGQPREPQVYTLPPSREEMTKNQVSLTCLVKGFYPSDIAVEWESNGQPENNYKTTPPVLDSDGSFFLYSKLTVDKSRWQQGNVFSCSVMHEALHNHYTQKSLSLSPGKGGGGQVQLVQSGAEVKKPGASVKVSCKASGYTFTSYWMHWVRQAPGQCLEWMGVIRTSTSYTIYNQKFKGRVTMTRDTSTSTVYMELSSLRSEDTAVYYCARSGPGYFDVWGQGTMVTVSSGGGGQGGGGQGGGGQDIQLTQSPSFLSASVGDRVTITCRASENIYSYLAWYQQKPGKAPKLLIYNAKTLAEGVPSRFSGSGSGTEFTLTISSLQPEDFATYYCQHNYGTPYTFGCGTKLEIKSGGGGQEVQLVESGGGLVQPGGSLKLSCAASGFTFNKYAMNWVRQAPGKGMEWVARIRSKYNNYATYYADAVKDRFTISRDDSKNTLYLQMNNLKTEDTAVYYCVRAGNFGSSYISYFAYWGQGTLVTVSSGGGGQGGGGQGGGGQQTVVTQEPSLTVSPGGTVTITCGSSTGAVTSGNYPNWIQKKPGQAPRGLIGGTKFLAPGTPARFSGSLEGGKAALTLSGVQPEDEAEYYCVLYYSNRWVFGSGTKLTVL

SEQ ID NO: 276 - protein, 1486 aa, Synthetic construct
QVQLQESGPGLVKPSETLSLTCTVSGGSISSSSYFWGWIRQPPGKCLEWIGNIYYSGSSNYNPSLKSRVTISVDTSKNQFSLKLSSVTAADTAVYYCARLPRGDRDAFDIWGQGTMVTVSSGGGGQGGGGQGGGGQDIVMTQSPSSLSASVGDRVTITCRASQGISNYLAWYQQKPGKVPKLLIYAASTLQSGVPSRFSGSGSGTDFTLTISSLQPEDFATYYCQQSYSTPFTFGCGTKVEIKSGGGGQEVQLVESGGGLVQPGGSLKLSCAASGFTFNKYAMNWVRQAPGKGMEWVARIRSKYNNYATYYADAVKDRFTISRDDSKNTLYLQMNNLKTEDTAVYYCVRAGNFGSSYISYFAYWGQGTLVTVSSGGGGQGGGGQGGGGQQTVVTQEPSLTVSPGGTVTITCGSSTGAVTSGNYPNWIQKKPGQAPRGLIGGTKFLAPGTPARFSGSLEGGKAALTLSGVQPEDEAEYYCVLYYSNRWVFGSGTKLTVLGGGGCPPCPAPELLGGPSVFLFPPKPKDTLMISRTPEVTCVVVDVSHEEPEVKFNWYVDGVEVHNAKTKPCEEQYGSTYRCVSVLTVLHQDWLNGKEYKCKVSNKALPAPIEKTISKAKGQPREPQVYTLPPSREEMTKNQVSLTCLVKGFYPSDIAVEWESNGQPENNYKTTPPVLDSDGSFFLYSKLTVDKSRWQQGNVFSCSVMHEALHNHYTQKSLSLSPGKGGGGQGGGGQGGGGQGGGGQGGGGQGGGGQCPPCPAPELLGGPSVFLFPPKPKDTLMISRTPEVTCVVVDVSHEEPEVKFNWYVDGVEVHNAKTKPCEEQYGSTYRCVSVLTVLHQDWLNGKEYKCKVSNKALPAPIEKTISKAKGQPREPQVYTLPPSREEMTKNQVSLTCLVKGFYPSDIAVEWESNGQPENNYKTTPPVLDSDGSFFLYSKLTVDKSRWQQGNVFSCSVMHEALHNHYTQKSLSLSPGKGGGGEVQLLESGGGLVQPGGSLRLSCAASGFSFSSYPINWVRQAPGKCLEWVGVIWTGGGTNYASSVKGRFTISRDNSKNTVYLQMNSLRAEDTAVYYCAKSRGVYDFKGRGAMDYWGQGTLVTVSSGGGGQGGGGQGGGGQDIVMTQSPDSLAVSLGERATINCKSSQSLLYSSNQKNYFAWYQQKPGQPPKLLIYWASTRESGVPDRFSGSGSGTDFTLTISSLQAEDVAVYYCQQYYSYPYTFGCGTKLEIKSGGGGQEVQLVESGGGLVQPGGSLKLSCAASGFTFNKYAMNWVRQAPGKGMEWVARIRSKYNNYATYYADAVKDRFTISRDDSKNTLYLQMNNLKTEDTAVYYCVRAGNFGSSYISYFAYWGQGTLVTVSSGGGGQGGGGQGGGGQQTVVTQEPSLTVSPGGTVTITCGSSTGAVTSGNYPNWIQKKPGQAPRGLIGGTKFLAPGTPARFSGSLEGGKAALTLSGVQPEDEAEYYCVLYYSNRWVFGSGTKLTVL

SEQ ID NO: 277 - protein, 1474 aa, Synthetic construct
QVQLQESGPGLVKPSETLSLTCTVSGGSISSSSYFWGWIRQPPGKCLEWIGNIYYSGSSNYNPSLKSRVTISVDTSKNQFSLKLSSVTAADTAVYYCARLPRGDRDAFDIWGQGTMVTVSSGGGGQGGGGQGGGGQDIVMTQSPSSLSASVGDRVTITCRASQGISNYLAWYQQKPGKVPKLLIYAASTLQSGVPSRFSGSGSGTDFTLTISSLQPEDFATYYCQQSYSTPFTFGCGTKVEIKSGGGGQEVQLVESGGGLVQPGGSLKLSCAASGFTFNKYAMNWVRQAPGKGMEWVARIRSKYNNYATYYADAVKDRFTISRDDSKNTLYLQMNNLKTEDTAVYYCVRAGNFGSSYISYFAYWGQGTLVTVSSGGGGQGGGGQGGGGQQTVVTQEPSLTVSPGGTVTITCGSSTGAVTSGNYPNWIQKKPGQAPRGLIGGTKFLAPGTPARFSGSLEGGKAALTLSGVQPEDEAEYYCVLYYSNRWVFGSGTKLTVLGGGGCPPCPAPELLGGPSVFLFPPKPKDTLMISRTPEVTCVVVDVSHEEPEVKFNWYVDGVEVHNAKTKPCEEQYGSTYRCVSVLTVLHQDWLNGKEYKCKVSNKALPAPIEKTISKAKGQPREPQVYTLPPSREEMTKNQVSLTCLVKGFYPSDIAVEWESNGQPENNYKTTPPVLDSDGSFFLYSKLTVDKSRWQQGNVFSCSVMHEALHNHYTQKSLSLSPGKGGGGQGGGGQGGGGQGGGGQGGGGQGGGGQCPPCPAPELLGGPSVFLFPPKPKDTLMISRTPEVTCVVVDVSHEEPEVKFNWYVDGVEVHNAKTKPCEEQYGSTYRCVSVLTVLHQDWLNGKEYKCKVSNKALPAPIEKTISKAKGQPREPQVYTLPPSREEMTKNQVSLTCLVKGFYPSDIAVEWESNGQPENNYKTTPPVLDSDGSFFLYSKLTVDKSRWQQGNVFSCSVMHEALHNHYTQKSLSLSPGKGGGGQVQLVQSGAEVKKPGASVKVSCKASGYTFTNYWMNWVRQAPGQCLEWMGNIAYGVKGTNYNQKFQGRVTMTVDTSSSTAYMELSRLRSDDTAVYYCATRYFYVMDYWGQGTLVTVSSGGGGQGGGGQGGGGQDIQMTQSPSSLSASVGDRVTITCRASQDISNYLNWYQQKPGKVPKLLIYYTSRLHSGVPSRFSGSGSGTDFTLTISSLQPEDVATYYCVQYAQFPLTFGCGTKVEIKSGGGGQEVQLVESGGGLVQPGGSLKLSCAASGFTFNKYAMNWVRQAPGKGMEWVARIRSKYNNYATYYADAVKDRFTISRDDSKNTLYLQMNNLKTEDTAVYYCVRAGNFGSSYISYFAYWGQGTLVTVSSGGGGQGGGGQGGGGQQTVVTQEPSLTVSPGGTVTITCGSSTGAVTSGNYPNWIQKKPGQAPRGLIGGTKFLAPGTPARFSGSLEGGKAALTLSGVQPEDEAEYYCVLYYSNRWVFGSGTKLTVL

SEQ ID NO: 278 - protein, 1506 aa, Synthetic construct
QVQLQESGPGLVKPSETLSLTCTVSGGSISSSSYFWGWIRQPPGKCLEWIGNIYYSGSSNYNPSLKSRVTISVDTSKNQFSLKLSSVTAADTAVYYCARLPRGDRDAFDIWGQGTMVTVSSGGGGSGGGGSGGGGSDIVMTQSPSSLSASVGDRVTITCRASQGISNYLAWYQQKPGKVPKLLIYAASTLQSGVPSRFSGSGSGTDFTLTISSLQPEDFATYYCQQSYSTPFTFGCGTKVEIKSGGGGSEVQLVESGGGLVQPGGSLKLSCAASGFTFNKYAMNWVRQAPGKGMEWVARIRSKYNNYATYYADAVKDRFTISRDDSKNTLYLQMNNLKTEDTAVYYCVRAGNFGSSYISYFAYWGQGTLVTVSSGGGGSGGGGSGGGGSQTVVTQEPSLTVSPGGTVTITCGSSTGAVTSGNYPNWIQKKPGQAPRGLIGGTKFLAPGTPARFSGSLEGGKAALTLSGVQPEDEAEYYCVLYYSNRWVFGSGTKLTVLGGGGSGGGGSGGGGSDKTHTCPPCPAPELLGGPSVFLFPPKPKDTLMISRTPEVTCVVVDVSHEDPEVKFNWYVDGVEVHNAKTKPCEEQYGSTYRCVSVLTVLHQDWLNGKEYKCKVSNKALPAPIEKTISKAKGQPREPQVYTLPPSREEMTKNQVSLTCLVKGFYPSDIAVEWESNGQPENNYKTTPPVLDSDGSFFLYSKLTVDKSRWQQGNVFSCSVMHEALHNHYTQKSLSLSPGKGGGGSGGGGSGGGGSGGGGSGGGGSGGGGSDKTHTCPPCPAPELLGGPSVFLFPPKPKDTLMISRTPEVTCVVVDVSHEDPEVKFNWYVDGVEVHNAKTKPCEEQYGSTYRCVSVLTVLHQDWLNGKEYKCKVSNKALPAPIEKTISKAKGQPREPQVYTLPPSREEMTKNQVSLTCLVKGFYPSDIAVEWESNGQPENNYKTTPPVLDSDGSFFLYSKLTVDKSRWQQGNVFSCSVMHEALHNHYTQKSLSLSPGKGGGGSGGGGSGGGGSQVQLVQSGAEVKKPGASVKVSCKASGYTFTSYWMHWVRQAPGQCLEWMGVIRTSTSYTIYNQKFKGRVTMTRDTSTSTVYMELSSLRSEDTAVYYCARSGPGYFDVWGQGTMVTVSSGGGGSGGGGSGGGGSDIQLTQSPSFLSASVGDRVTITCRASENIYSYLAWYQQKPGKAPKLLIYNAKTLAEGVPSRFSGSGSGTEFTLTISSLQPEDFATYYCQHNYGTPYTFGCGTKLEIKSGGGGSEVQLVESGGGLVQPGGSLKLSCAASGFTFNKYAMNWVRQAPGKGMEWVARIRSKYNNYATYYADAVKDRFTISRDDSKNTLYLQMNNLKTEDTAVYYCVRAGNFGSSYISYFAYWGQGTLVTVSSGGGGSGGGGSGGGGSQTVVTQEPSLTVSPGGTVTITCGSSTGAVTSGNYPNWIQKKPGQAPRGLIGGTKFLAPGTPARFSGSLEGGKAALTLSGVQPEDEAEYYCVLYYSNRWVFGSGTKLTVL

SEQ ID NO: 279 - protein, 1506 aa, Synthetic construct
QVQLQESGPGLVKPSETLSLTCTVSGGSISSSSYFWGWIRQPPGKCLEWIGNIYYSGSSNYNPSLKSRVTISVDTSKNQFSLKLSSVTAADTAVYYCARLPRGDRDAFDIWGQGTMVTVSSGGGGSGGGGSGGGGSDIVMTQSPSSLSASVGDRVTITCRASQGISNYLAWYQQKPGKVPKLLIYAASTLQSGVPSRFSGSGSGTDFTLTISSLQPEDFATYYCQQSYSTPFTFGCGTKVEIKSGGGGSEVQLVESGGGLVQPGGSLKLSCAASGFTFNKYAMNWVRQAPGKGMEWVARIRSKYNNYATYYADAVKDRFTISRDDSKNTLYLQMNNLKTEDTAVYYCVRAGNFGSSYISYFAYWGQGTLVTVSSGGGGSGGGGSGGGGSQTVVTQEPSLTVSPGGTVTITCGSSTGAVTSGNYPNWIQKKPGQAPRGLIGGTKFLAPGTPARFSGSLEGGKAALTLSGVQPEDEAEYYCVLYYSNRWVFGSGTKLTVLGGGGSGGGGSGGGGSDKTHTCPPCPAPELLGGPSVFLFPPKPKDTLMISRTPEVTCVVVDVSHEDPEVKFNWYVDGVEVHNAKTKPCEEQYGSTYRCVSVLTVLHQDWLNGKEYKCKVSNKALPAPIEKTISKAKGQPREPQVYTLPPSREEMTKNQVSLTCLVKGFYPSDIAVEWESNGQPENNYKTTPPVLDSDGSFFLYSKLTVDKSRWQQGNVFSCSVMHEALHNHYTQKSLSLSPGKGGGGSGGGGSGGGGSGGGGSGGGGSGGGGSDKTHTCPPCPAPELLGGPSVFLFPPKPKDTLMISRTPEVTCVVVDVSHEDPEVKFNWYVDGVEVHNAKTKPCEEQYGSTYRCVSVLTVLHQDWLNGKEYKCKVSNKALPAPIEKTISKAKGQPREPQVYTLPPSREEMTKNQVSLTCLVKGFYPSDIAVEWESNGQPENNYKTTPPVLDSDGSFFLYSKLTVDKSRWQQGNVFSCSVMHEALHNHYTQKSLSLSPGKGGGGSGGGGSGGGGSQVQLVQSGAEVKKPGASVKVSCKASGYTFTNYWMNWVRQAPGQCLEWMGNIHSKAHGTNYNQKFQGRVTMTVDTSSSTAYMELSRLRSDDTAVYYCATRYFYVMDYWGQGTLVTVSSGGGGSGGGGSGGGGSDIQMTQSPSSLSASVGDRVTITCRASQDISNYLNWYQQKPGKVPKLLIYYTSRLHSGVPSRFSGSGSGTDFTLTISSLQPEDVATYYCVQYAQFPLTFGCGTKVEIKSGGGGSEVQLVESGGGLVQPGGSLKLSCAASGFTFNKYAMNWVRQAPGKGMEWVARIRSKYNNYATYYADAVKDRFTISRDDSKNTLYLQMNNLKTEDTAVYYCVRAGNFGSSYISYFAYWGQGTLVTVSSGGGGSGGGGSGGGGSQTVVTQEPSLTVSPGGTVTITCGSSTGAVTSGNYPNWIQKKPGQAPRGLIGGTKFLAPGTPARFSGSLEGGKAALTLSGVQPEDEAEYYCVLYYSNRWVFGSGTKLTVL

SEQ ID NO: 280 - protein, 1484 aa, Synthetic construct
QVQLQESGPGLVKPSETLSLTCTVSGGSISSSSYFWGWIRQPPGKCLEWIGNIYYSGSSNYNPSLKSRVTISVDTSKNQFSLKLSSVTAADTAVYYCARLPRGDRDAFDIWGQGTMVTVSSGGGGSGGGGSGGGGSDIVMTQSPSSLSASVGDRVTITCRASQGISNYLAWYQQKPGKVPKLLIYAASTLQSGVPSRFSGSGSGTDFTLTISSLQPEDFATYYCQQSYSTPFTFGCGTKVEIKSGGGGSEVQLVESGGGLVQPGGSLKLSCAASGFTFNKYAINWVREAPGKGLEWVARIRSKYNNYATYYADAVKDRFTISRDDSKNTAYLQMNNLKTEDTAVYYCVRNANFGTSYISYFAYWGQGTLVTVSSGGGGSGGGGSGGGGSQTVVTQEPSLTVSPGGTVTLTCGSSTGAVTSGNYPNWVQKKPGQAPRGLIGGTKFLAPGTPARFSGSLLGGKAALTLSGVQPEDEAEYYCVLWYSNRWVFGSGTKLTVLGGGGDKTHTCPPCPAPELLGGPSVFLFPPKPKDTLMISRTPEVTCVVVDVSHEDPEVKFNWYVDGVEVHNAKTKPCEEQYGSTYRCVSVLTVLHQDWLNGKEYKCKVSNKALPAPIEKTISKAKGQPREPQVYTLPPSREEMTKNQVSLTCLVKGFYPSDIAVEWESNGQPENNYKTTPPVLDSDGSFFLYSKLTVDKSRWQQGNVFSCSVMHEALHNHYTQKSLSLSPGKGGGGSGGGGSGGGGSGGGGSGGGGSGGGGSDKTHTCPPCPAPELLGGPSVFLFPPKPKDTLMISRTPEVTCVVVDVSHEDPEVKFNWYVDGVEVHNAKTKPCEEQYGSTYRCVSVLTVLHQDWLNGKEYKCKVSNKALPAPIEKTISKAKGQPREPQVYTLPPSREEMTKNQVSLTCLVKGFYPSDIAVEWESNGQPENNYKTTPPVLDSDGSFFLYSKLTVDKSRWQQGNVFSCSVMHEALHNHYTQKSLSLSPGKGGGGQVQLVQSGAEVKKPGASVKVSCKASGYTFTNYWMNWVRQAPGQCLEWMGNIAYGVKGTNYNQKFQGRVTMTVDTSSSTAYMELSRLRSDDTAVYYCATRYFYVMDYWGQGTLVTVSSGGGGSGGGGSGGGGSDIQMTQSPSSLSASVGDRVTITCRASQDISNYLNWYQQKPGKVPKLLIYYTSRLHSGVPSRFSGSGSGTDFTLTISSLQPEDVATYYCVQYAQFPLTFGCGTKVEIKSGGGGSEVQLVESGGGLVQPGGSLKLSCAASGFTFNKYAINWVREAPGKGLEWVARIRSKYNNYATYYADAVKDRFTISRDDSKNTAYLQMNNLKTEDTAVYYCVRNANFGTSYISYFAYWGQGTLVTVSSGGGGSGGGGSGGGGSQTVVTQEPSLTVSPGGTVTLTCGSSTGAVTSGNYPNWVQKKPGQAPRGLIGGTKFLAPGTPARFSGSLLGGKAALTLSGVQPEDEAEYYCVLWYSNRWVFGSGTKLTVL

SEQ ID NO: 281 - protein, 1500 aa, Synthetic construct
QVQLQESGPGLVKPSETLSLTCTVSGGSISSSSYFWGWIRQPPGKCLEWIGNIYYSGSSNYNPSLKSRVTISVDTSKNQFSLKLSSVTAADTAVYYCARLPRGDRDAFDIWGQGTMVTVSSGGGGQGGGGQGGGGQDIVMTQSPSSLSASVGDRVTITCRASQGISNYLAWYQQKPGKVPKLLIYAASTLQSGVPSRFSGSGSGTDFTLTISSLQPEDFATYYCQQSYSTPFTFGCGTKVEIKSGGGGQEVQLVESGGGLVQPGGSLKLSCAASGFTFNKYAINWVREAPGKGLEWVARIRSKYNNYATYYADAVKDRFTISRDDSKNTAYLQMNNLKTEDTAVYYCVRNANFGTSYISYFAYWGQGTLVTVSSGGGGQGGGGQGGGGQQTVVTQEPSLTVSPGGTVTLTCGSSTGAVTSGNYPNWVQKKPGQAPRGLIGGTKFLAPGTPARFSGSLLGGKAALTLSGVQPEDEAEYYCVLWYSNRWVFGSGTKLTVLGGGGQGGGGQGGGGQCPPCPAPELLGGPSVFLFPPKPKDTLMISRTPEVTCVVVDVSHEEPEVKFNWYVDGVEVHNAKTKPCEEQYGSTYRCVSVLTVLHQDWLNGKEYKCKVSNKALPAPIEKTISKAKGQPREPQVYTLPPSREEMTKNQVSLTCLVKGFYPSDIAVEWESNGQPENNYKTTPPVLDSDGSFFLYSKLTVDKSRWQQGNVFSCSVMHEALHNHYTQKSLSLSPGKGGGGQGGGGQGGGGQGGGGQGGGGQGGGGQCPPCPAPELLGGPSVFLFPPKPKDTLMISRTPEVTCVVVDVSHEEPEVKFNWYVDGVEVHNAKTKPCEEQYGSTYRCVSVLTVLHQDWLNGKEYKCKVSNKALPAPIEKTISKAKGQPREPQVYTLPPSREEMTKNQVSLTCLVKGFYPSDIAVEWESNGQPENNYKTTPPVLDSDGSFFLYSKLTVDKSRWQQGNVFSCSVMHEALHNHYTQKSLSLSPGKGGGGQGGGGQGGGGQQVQLVQSGAEVVKPGASVKVSCKASGYTFTSSWMNWVRQAPGQCLEWMGRIYTGTGETKYSGKFQGRVTITRDTSASTAYMELSSLTSEDTAVYYCARQRDYGALYAMDYWGQGTLVTVSSGGGGQGGGGQGGGGQDIQLTQSPSFLSASVGDRVTITCRASDDIYSYLAWYQQKPGKAPKLLVYNAKTLAEGVPSRFSGSGSGTEFTLTISSLQPEDFATYYCQNHDRTPFTFGCGTKVDIKSGGGGQEVQLVESGGGLVQPGGSLKLSCAASGFTFNKYAINWVREAPGKGLEWVARIRSKYNNYATYYADAVKDRFTISRDDSKNTAYLQMNNLKTEDTAVYYCVRNANFGTSYISYFAYWGQGTLVTVSSGGGGQGGGGQGGGGQQTVVTQEPSLTVSPGGTVTLTCGSSTGAVTSGNYPNWVQKKPGQAPRGLIGGTKFLAPGTPARFSGSLLGGKAALTLSGVQPEDEAEYYCVLWYSNRWVFGSGTKLTVL

SEQ ID NO: 282 - protein, 1496 aa, Synthetic construct
QVQLQESGPGLVKPSETLSLTCTVSGGSISSSSYFWGWIRQPPGKCLEWIGNIYYSGSSNYNPSLKSRVTISVDTSKNQFSLKLSSVTAADTAVYYCARLPRGDRDAFDIWGQGTMVTVSSGGGGQGGGGQGGGGQDIVMTQSPSSLSASVGDRVTITCRASQGISNYLAWYQQKPGKVPKLLIYAASTLQSGVPSRFSGSGSGTDFTLTISSLQPEDFATYYCQQSYSTPFTFGCGTKVEIKSGGGGQEVQLVESGGGLVQPGGSLKLSCAASGFTFNKYAINWVREAPGKGLEWVARIRSKYNNYATYYADAVKDRFTISRDDSKNTAYLQMNNLKTEDTAVYYCVRNANFGTSYISYFAYWGQGTLVTVSSGGGGQGGGGQGGGGQQTVVTQEPSLTVSPGGTVTLTCGSSTGAVTSGNYPNWVQKKPGQAPRGLIGGTKFLAPGTPARFSGSLLGGKAALTLSGVQPEDEAEYYCVLWYSNRWVFGSGTKLTVLGGGGQGGGGQGGGGQCPPCPAPELLGGPSVFLFPPKPKDTLMISRTPEVTCVVVDVSHEEPEVKFNWYVDGVEVHNAKTKPCEEQYGSTYRCVSVLTVLHQDWLNGKEYKCKVSNKALPAPIEKTISKAKGQPREPQVYTLPPSREEMTKNQVSLTCLVKGFYPSDIAVEWESNGQPENNYKTTPPVLDSDGSFFLYSKLTVDKSRWQQGNVFSCSVMHEALHNHYTQKSLSLSPGKGGGGQGGGGQGGGGQGGGGQGGGGQGGGGQCPPCPAPELLGGPSVFLFPPKPKDTLMISRTPEVTCVVVDVSHEEPEVKFNWYVDGVEVHNAKTKPCEEQYGSTYRCVSVLTVLHQDWLNGKEYKCKVSNKALPAPIEKTISKAKGQPREPQVYTLPPSREEMTKNQVSLTCLVKGFYPSDIAVEWESNGQPENNYKTTPPVLDSDGSFFLYSKLTVDKSRWQQGNVFSCSVMHEALHNHYTQKSLSLSPGKGGGGQGGGGQGGGGQQVQLVQSGAEVKKPGASVKVSCKASGYTFTNYWMNWVRQAPGQCLEWMGNIAYGVKGTNYNQKFQGRVTMTVDTSSSTAYMELSRLRSDDTAVYYCATRYFYVMDYWGQGTLVTVSSGGGGQGGGGQGGGGQDIQMTQSPSSLSASVGDRVTITCRASQDISNYLNWYQQKPGKVPKLLIYYTSRLHSGVPSRFSGSGSGTDFTLTISSLQPEDVATYYCVQYAQFPLTFGCGTKVEIKSGGGGQEVQLVESGGGLVQPGGSLKLSCAASGFTFNKYAINWVREAPGKGLEWVARIRSKYNNYATYYADAVKDRFTISRDDSKNTAYLQMNNLKTEDTAVYYCVRNANFGTSYISYFAYWGQGTLVTVSSGGGGQGGGGQGGGGQQTVVTQEPSLTVSPGGTVTLTCGSSTGAVTSGNYPNWVQKKPGQAPRGLIGGTKFLAPGTPARFSGSLLGGKAALTLSGVQPEDEAEYYCVLWYSNRWVFGSGTKLTVL

SEQ ID NO: 283 - protein, 1486 aa, Synthetic construct
QVQLQESGPGLVKPSETLSLTCTVSGGSISSSSYFWGWIRQPPGKCLEWIGNIYYSGSSNYNPSLKSRVTISVDTSKNQFSLKLSSVTAADTAVYYCARLPRGDRDAFDIWGQGTMVTVSSGGGGQGGGGQGGGGQDIVMTQSPSSLSASVGDRVTITCRASQGISNYLAWYQQKPGKVPKLLIYAASTLQSGVPSRFSGSGSGTDFTLTISSLQPEDFATYYCQQSYSTPFTFGCGTKVEIKSGGGGQEVQLVESGGGLVQPGGSLKLSCAASGFTFNKYAINWVREAPGKGLEWVARIRSKYNNYATYYADAVKDRFTISRDDSKNTAYLQMNNLKTEDTAVYYCVRNANFGTSYISYFAYWGQGTLVTVSSGGGGQGGGGQGGGGQQTVVTQEPSLTVSPGGTVTLTCGSSTGAVTSGNYPNWVQKKPGQAPRGLIGGTKFLAPGTPARFSGSLLGGKAALTLSGVQPEDEAEYYCVLWYSNRWVFGSGTKLTVLGGGGCPPCPAPELLGGPSVFLFPPKPKDTLMISRTPEVTCVVVDVSHEEPEVKFNWYVDGVEVHNAKTKPCEEQYGSTYRCVSVLTVLHQDWLNGKEYKCKVSNKALPAPIEKTISKAKGQPREPQVYTLPPSREEMTKNQVSLTCLVKGFYPSDIAVEWESNGQPENNYKTTPPVLDSDGSFFLYSKLTVDKSRWQQGNVFSCSVMHEALHNHYTQKSLSLSPGKGGGGQGGGGQGGGGQGGGGQGGGGQGGGGQCPPCPAPELLGGPSVFLFPPKPKDTLMISRTPEVTCVVVDVSHEEPEVKFNWYVDGVEVHNAKTKPCEEQYGSTYRCVSVLTVLHQDWLNGKEYKCKVSNKALPAPIEKTISKAKGQPREPQVYTLPPSREEMTKNQVSLTCLVKGFYPSDIAVEWESNGQPENNYKTTPPVLDSDGSFFLYSKLTVDKSRWQQGNVFSCSVMHEALHNHYTQKSLSLSPGKGGGGEVQLLESGGGLVQPGGSLRLSCAASGFSFSSYPINWVRQAPGKCLEWVGVIWTGGGTNYASSVKGRFTISRDNSKNTVYLQMNSLRAEDTAVYYCAKSRGVYDFKGRGAMDYWGQGTLVTVSSGGGGQGGGGQGGGGQDIVMTQSPDSLAVSLGERATINCKSSQSLLYSSNQKNYFAWYQQKPGQPPKLLIYWASTRESGVPDRFSGSGSGTDFTLTISSLQAEDVAVYYCQQYYSYPYTFGCGTKLEIKSGGGGQEVQLVESGGGLVQPGGSLKLSCAASGFTFNKYAINWVREAPGKGLEWVARIRSKYNNYATYYADAVKDRFTISRDDSKNTAYLQMNNLKTEDTAVYYCVRNANFGTSYISYFAYWGQGTLVTVSSGGGGQGGGGQGGGGQQTVVTQEPSLTVSPGGTVTLTCGSSTGAVTSGNYPNWVQKKPGQAPRGLIGGTKFLAPGTPARFSGSLLGGKAALTLSGVQPEDEAEYYCVLWYSNRWVFGSGTKLTVL

SEQ ID NO: 284 - protein, 1478 aa, Synthetic construct
QVQLQESGPGLVKPSETLSLTCTVSGGSISSSSYFWGWIRQPPGKCLEWIGNIYYSGSSNYNPSLKSRVTISVDTSKNQFSLKLSSVTAADTAVYYCARLPRGDRDAFDIWGQGTMVTVSSGGGGQGGGGQGGGGQDIVMTQSPSSLSASVGDRVTITCRASQGISNYLAWYQQKPGKVPKLLIYAASTLQSGVPSRFSGSGSGTDFTLTISSLQPEDFATYYCQQSYSTPFTFGCGTKVEIKSGGGGQEVQLVESGGGLVQPGGSLKLSCAASGFTFNKYAINWVREAPGKGLEWVARIRSKYNNYATYYADAVKDRFTISRDDSKNTAYLQMNNLKTEDTAVYYCVRNANFGTSYISYFAYWGQGTLVTVSSGGGGQGGGGQGGGGQQTVVTQEPSLTVSPGGTVTLTCGSSTGAVTSGNYPNWVQKKPGQAPRGLIGGTKFLAPGTPARFSGSLLGGKAALTLSGVQPEDEAEYYCVLWYSNRWVFGSGTKLTVLGGGGCPPCPAPELLGGPSVFLFPPKPKDTLMISRTPEVTCVVVDVSHEEPEVKFNWYVDGVEVHNAKTKPCEEQYGSTYRCVSVLTVLHQDWLNGKEYKCKVSNKALPAPIEKTISKAKGQPREPQVYTLPPSREEMTKNQVSLTCLVKGFYPSDIAVEWESNGQPENNYKTTPPVLDSDGSFFLYSKLTVDKSRWQQGNVFSCSVMHEALHNHYTQKSLSLSPGKGGGGQGGGGQGGGGQGGGGQGGGGQGGGGQCPPCPAPELLGGPSVFLFPPKPKDTLMISRTPEVTCVVVDVSHEEPEVKFNWYVDGVEVHNAKTKPCEEQYGSTYRCVSVLTVLHQDWLNGKEYKCKVSNKALPAPIEKTISKAKGQPREPQVYTLPPSREEMTKNQVSLTCLVKGFYPSDIAVEWESNGQPENNYKTTPPVLDSDGSFFLYSKLTVDKSRWQQGNVFSCSVMHEALHNHYTQKSLSLSPGKGGGGQVQLVQSGAEVVKPGASVKVSCKASGYTFTSSWMNWVRQAPGQCLEWMGRIYTGTGETKYSGKFQGRVTITRDTSASTAYMELSSLTSEDTAVYYCARQRDYGALYAMDYWGQGTLVTVSSGGGGQGGGGQGGGGQDIQLTQSPSFLSASVGDRVTITCRASDDIYSYLAWYQQKPGKAPKLLVYNAKTLAEGVPSRFSGSGSGTEFTLTISSLQPEDFATYYCQNHDRTPFTFGCGTKVDIKSGGGGQEVQLVESGGGLVQPGGSLKLSCAASGFTFNKYAINWVREAPGKGLEWVARIRSKYNNYATYYADAVKDRFTISRDDSKNTAYLQMNNLKTEDTAVYYCVRNANFGTSYISYFAYWGQGTLVTVSSGGGGQGGGGQGGGGQQTVVTQEPSLTVSPGGTVTLTCGSSTGAVTSGNYPNWVQKKPGQAPRGLIGGTKFLAPGTPARFSGSLLGGKAALTLSGVQPEDEAEYYCVLWYSNRWVFGSGTKLTVL

SEQ ID NO: 285 - protein, 1474 aa, Synthetic construct
QVQLQESGPGLVKPSETLSLTCTVSGGSISSSSYFWGWIRQPPGKCLEWIGNIYYSGSSNYNPSLKSRVTISVDTSKNQFSLKLSSVTAADTAVYYCARLPRGDRDAFDIWGQGTMVTVSSGGGGQGGGGQGGGGQDIVMTQSPSSLSASVGDRVTITCRASQGISNYLAWYQQKPGKVPKLLIYAASTLQSGVPSRFSGSGSGTDFTLTISSLQPEDFATYYCQQSYSTPFTFGCGTKVEIKSGGGGQEVQLVESGGGLVQPGGSLKLSCAASGFTFNKYAINWVREAPGKGLEWVARIRSKYNNYATYYADAVKDRFTISRDDSKNTAYLQMNNLKTEDTAVYYCVRNANFGTSYISYFAYWGQGTLVTVSSGGGGQGGGGQGGGGQQTVVTQEPSLTVSPGGTVTLTCGSSTGAVTSGNYPNWVQKKPGQAPRGLIGGTKFLAPGTPARFSGSLLGGKAALTLSGVQPEDEAEYYCVLWYSNRWVFGSGTKLTVLGGGGCPPCPAPELLGGPSVFLFPPKPKDTLMISRTPEVTCVVVDVSHEEPEVKFNWYVDGVEVHNAKTKPCEEQYGSTYRCVSVLTVLHQDWLNGKEYKCKVSNKALPAPIEKTISKAKGQPREPQVYTLPPSREEMTKNQVSLTCLVKGFYPSDIAVEWESNGQPENNYKTTPPVLDSDGSFFLYSKLTVDKSRWQQGNVFSCSVMHEALHNHYTQKSLSLSPGKGGGGQGGGGQGGGGQGGGGQGGGGQGGGGQCPPCPAPELLGGPSVFLFPPKPKDTLMISRTPEVTCVVVDVSHEEPEVKFNWYVDGVEVHNAKTKPCEEQYGSTYRCVSVLTVLHQDWLNGKEYKCKVSNKALPAPIEKTISKAKGQPREPQVYTLPPSREEMTKNQVSLTCLVKGFYPSDIAVEWESNGQPENNYKTTPPVLDSDGSFFLYSKLTVDKSRWQQGNVFSCSVMHEALHNHYTQKSLSLSPGKGGGGQVQLVQSGAEVKKPGASVKVSCKASGYTFTSYWMHWVRQAPGQCLEWMGVIRTSTSYTIYNQKFKGRVTMTRDTSTSTVYMELSSLRSEDTAVYYCARSGPGYFDVWGQGTMVTVSSGGGGQGGGGQGGGGQDIQLTQSPSFLSASVGDRVTITCRASENIYSYLAWYQQKPGKAPKLLIYNAKTLAEGVPSRFSGSGSGTEFTLTISSLQPEDFATYYCQHNYGTPYTFGCGTKLEIKSGGGGQEVQLVESGGGLVQPGGSLKLSCAASGFTFNKYAINWVREAPGKGLEWVARIRSKYNNYATYYADAVKDRFTISRDDSKNTAYLQMNNLKTEDTAVYYCVRNANFGTSYISYFAYWGQGTLVTVSSGGGGQGGGGQGGGGQQTVVTQEPSLTVSPGGTVTLTCGSSTGAVTSGNYPNWVQKKPGQAPRGLIGGTKFLAPGTPARFSGSLLGGKAALTLSGVQPEDEAEYYCVLWYSNRWVFGSGTKLTVL

SEQ ID NO: 286 - protein, 1506 aa, Synthetic construct
QVQLQESGPGLVKPSETLSLTCTVSGGSISSSSYFWGWIRQPPGKCLEWIGNIYYSGSSNYNPSLKSRVTISVDTSKNQFSLKLSSVTAADTAVYYCARLPRGDRDAFDIWGQGTMVTVSSGGGGSGGGGSGGGGSDIVMTQSPSSLSASVGDRVTITCRASQGISNYLAWYQQKPGKVPKLLIYAASTLQSGVPSRFSGSGSGTDFTLTISSLQPEDFATYYCQQSYSTPFTFGCGTKVEIKSGGGGSEVQLVESGGGLVQPGGSLKLSCAASGFTFNKYAINWVREAPGKGLEWVARIRSKYNNYATYYADAVKDRFTISRDDSKNTAYLQMNNLKTEDTAVYYCVRNANFGTSYISYFAYWGQGTLVTVSSGGGGSGGGGSGGGGSQTVVTQEPSLTVSPGGTVTLTCGSSTGAVTSGNYPNWVQKKPGQAPRGLIGGTKFLAPGTPARFSGSLLGGKAALTLSGVQPEDEAEYYCVLWYSNRWVFGSGTKLTVLGGGGSGGGGSGGGGSDKTHTCPPCPAPELLGGPSVFLFPPKPKDTLMISRTPEVTCVVVDVSHEDPEVKFNWYVDGVEVHNAKTKPCEEQYGSTYRCVSVLTVLHQDWLNGKEYKCKVSNKALPAPIEKTISKAKGQPREPQVYTLPPSREEMTKNQVSLTCLVKGFYPSDIAVEWESNGQPENNYKTTPPVLDSDGSFFLYSKLTVDKSRWQQGNVFSCSVMHEALHNHYTQKSLSLSPGKGGGGSGGGGSGGGGSGGGGSGGGGSGGGGSDKTHTCPPCPAPELLGGPSVFLFPPKPKDTLMISRTPEVTCVVVDVSHEDPEVKFNWYVDGVEVHNAKTKPCEEQYGSTYRCVSVLTVLHQDWLNGKEYKCKVSNKALPAPIEKTISKAKGQPREPQVYTLPPSREEMTKNQVSLTCLVKGFYPSDIAVEWESNGQPENNYKTTPPVLDSDGSFFLYSKLTVDKSRWQQGNVFSCSVMHEALHNHYTQKSLSLSPGKGGGGSGGGGSGGGGSQVQLVQSGAEVKKPGASVKVSCKASGYTFTNYWMNWVRQAPGQCLEWMGNIAYGVKGTNYNQKFQGRVTMTVDTSSSTAYMELSRLRSDDTAVYYCATRYFYVMDYWGQGTLVTVSSGGGGSGGGGSGGGGSDIQMTQSPSSLSASVGDRVTITCRASQDISNYLNWYQQKPGKVPKLLIYYTSRLHSGVPSRFSGSGSGTDFTLTISSLQPEDVATYYCVQYAQFPLTFGCGTKVEIKSGGGGSEVQLVESGGGLVQPGGSLKLSCAASGFTFNKYAINWVREAPGKGLEWVARIRSKYNNYATYYADAVKDRFTISRDDSKNTAYLQMNNLKTEDTAVYYCVRNANFGTSYISYFAYWGQGTLVTVSSGGGGSGGGGSGGGGSQTVVTQEPSLTVSPGGTVTLTCGSSTGAVTSGNYPNWVQKKPGQAPRGLIGGTKFLAPGTPARFSGSLLGGKAALTLSGVQPEDEAEYYCVLWYSNRWVFGSGTKLTVL

SEQ ID NO: 287 - protein, 1506 aa, Synthetic construct
QVQLQESGPGLVKPSETLSLTCTVSGGSISSSSYFWGWIRQPPGKCLEWIGNIYYSGSSNYNPSLKSRVTISVDTSKNQFSLKLSSVTAADTAVYYCARLPRGDRDAFDIWGQGTMVTVSSGGGGSGGGGSGGGGSDIVMTQSPSSLSASVGDRVTITCRASQGISNYLAWYQQKPGKVPKLLIYAASTLQSGVPSRFSGSGSGTDFTLTISSLQPEDFATYYCQQSYSTPFTFGCGTKVEIKSGGGGSEVQLVESGGGLVQPGGSLKLSCAASGFTFNKYAMNWVRQAPGKCLEWVARIRSKYNNYATYYADSVKDRFTISRDDSKNTAYLQMNNLKTEDTAVYYCVRHGNFGNSYISYWAYWGQGTLVTVSSGGGGSGGGGSGGGGSQTVVTQEPSLTVSPGGTVTLTCGSSTGAVTSGNYPNWVQQKPGQAPRGLIGGTKFLAPGTPARFSGSLLGGKAALTLSGVQPEDEAEYYCVLWYSNRWVFGCGTKLTVLGGGGSGGGGSGGGGSDKTHTCPPCPAPELLGGPSVFLFPPKPKDTLMISRTPEVTCVVVDVSHEDPEVKFNWYVDGVEVHNAKTKPCEEQYGSTYRCVSVLTVLHQDWLNGKEYKCKVSNKALPAPIEKTISKAKGQPREPQVYTLPPSREEMTKNQVSLTCLVKGFYPSDIAVEWESNGQPENNYKTTPPVLDSDGSFFLYSKLTVDKSRWQQGNVFSCSVMHEALHNHYTQKSLSLSPGKGGGGSGGGGSGGGGSGGGGSGGGGSGGGGSDKTHTCPPCPAPELLGGPSVFLFPPKPKDTLMISRTPEVTCVVVDVSHEDPEVKFNWYVDGVEVHNAKTKPCEEQYGSTYRCVSVLTVLHQDWLNGKEYKCKVSNKALPAPIEKTISKAKGQPREPQVYTLPPSREEMTKNQVSLTCLVKGFYPSDIAVEWESNGQPENNYKTTPPVLDSDGSFFLYSKLTVDKSRWQQGNVFSCSVMHEALHNHYTQKSLSLSPGKGGGGSGGGGSGGGGSQVQLVQSGAEVKKPGASVKVSCKASGYTFTSYWMHWVRQAPGQCLEWMGVIYTSGSYTIYNQKFQGRVTMTRDTSTSTAYMELSSLRSEDTAVYYCARSGPGYFDVWGQGTMVTVSSGGGGSGGGGSGGGGSDIQLTQSPSFLSASVGDRVTITCRASGNIHNYLAWYQQKPGKAPKLLIYNAKTLAEGVPSRFSGSGSGTEFTLKISSLQPEDFATYYCQHFAWTPYTFGCGTKLEIKSGGGGSEVQLVESGGGLVQPGGSLKLSCAASGFTFNKYAMNWVRQAPGKCLEWVARIRSKYNNYATYYADSVKDRFTISRDDSKNTAYLQMNNLKTEDTAVYYCVRHGNFGNSYISYWAYWGQGTLVTVSSGGGGSGGGGSGGGGSQTVVTQEPSLTVSPGGTVTLTCGSSTGAVTSGNYPNWVQQKPGQAPRGLIGGTKFLAPGTPARFSGSLLGGKAALTLSGVQPEDEAEYYCVLWYSNRWVFGCGTKLTVL

SEQ ID NO: 288 - protein, 1508 aa, Synthetic construct
QVQLQESGPGLVKPSETLSLTCTVSGGSISSSSYFWGWIRQPPGKCLEWIGNIYYSGSSNYNPSLKSRVTISVDTSKNQFSLKLSSVTAADTAVYYCARLPRGDRDAFDIWGQGTMVTVSSGGGGQGGGGQGGGGQDIVMTQSPSSLSASVGDRVTITCRASQGISNYLAWYQQKPGKVPKLLIYAASTLQSGVPSRFSGSGSGTDFTLTISSLQPEDFATYYCQQSYSTPFTFGCGTKVEIKSGGGGQEVQLVESGGGLVQPGGSLKLSCAASGFTFNKYAMNWVRQAPGKGMEWVARIRSKYNNYATYYADAVKDRFTISRDDSKNTLYLQMNNLKTEDTAVYYCVRAGNFGSSYISYFAYWGQGTLVTVSSGGGGQGGGGQGGGGQQTVVTQEPSLTVSPGGTVTITCGSSTGAVTSGNYPNWIQKKPGQAPRGLIGGTKFLAPGTPARFSGSLEGGKAALTLSGVQPEDEAEYYCVLYYSNRWVFGSGTKLTVLGGGGQGGGGQGGGGQCPPCPAPELLGGPSVFLFPPKPKDTLMISRTPEVTCVVVDVSHEEPEVKFNWYVDGVEVHNAKTKPCEEQYGSTYRCVSVLTVLHQDWLNGKEYKCKVSNKALPAPIEKTISKAKGQPREPQVYTLPPSREEMTKNQVSLTCLVKGFYPSDIAVEWESNGQPENNYKTTPPVLDSDGSFFLYSKLTVDKSRWQQGNVFSCSVMHEALHNHYTQKSLSLSPGKGGGGQGGGGQGGGGQGGGGQGGGGQGGGGQCPPCPAPELLGGPSVFLFPPKPKDTLMISRTPEVTCVVVDVSHEEPEVKFNWYVDGVEVHNAKTKPCEEQYGSTYRCVSVLTVLHQDWLNGKEYKCKVSNKALPAPIEKTISKAKGQPREPQVYTLPPSREEMTKNQVSLTCLVKGFYPSDIAVEWESNGQPENNYKTTPPVLDSDGSFFLYSKLTVDKSRWQQGNVFSCSVMHEALHNHYTQKSLSLSPGKGGGGQGGGGQGGGGQEVQLLESGGGLVQPGGSLRLSCAASGFSFSSYPINWVRQAPGKCLEWVGVIWTGGGTNYASSVKGRFTISRDNSKNTVYLQMNSLRAEDTAVYYCAKSRGVYDFKGRGAMDYWGQGTLVTVSSGGGGQGGGGQGGGGQDIVMTQSPDSLAVSLGERATINCKSSQSLLYSSNQKNYFAWYQQKPGQPPKLLIYWASTRESGVPDRFSGSGSGTDFTLTISSLQAEDVAVYYCQQYYSYPYTFGCGTKLEIKSGGGGQEVQLVESGGGLVQPGGSLKLSCAASGFTFNKYAMNWVRQAPGKGMEWVARIRSKYNNYATYYADAVKDRFTISRDDSKNTLYLQMNNLKTEDTAVYYCVRAGNFGSSYISYFAYWGQGTLVTVSSGGGGQGGGGQGGGGQQTVVTQEPSLTVSPGGTVTITCGSSTGAVTSGNYPNWIQKKPGQAPRGLIGGTKFLAPGTPARFSGSLEGGKAALTLSGVQPEDEAEYYCVLYYSNRWVFGSGTKLTVL

SEQ ID NO: 289 - protein, 1496 aa, Synthetic construct
QVQLQESGPGLVKPSETLSLTCTVSGGSISSSSYFWGWIRQPPGKCLEWIGNIYYSGSSNYNPSLKSRVTISVDTSKNQFSLKLSSVTAADTAVYYCARLPRGDRDAFDIWGQGTMVTVSSGGGGQGGGGQGGGGQDIVMTQSPSSLSASVGDRVTITCRASQGISNYLAWYQQKPGKVPKLLIYAASTLQSGVPSRFSGSGSGTDFTLTISSLQPEDFATYYCQQSYSTPFTFGCGTKVEIKSGGGGQEVQLVESGGGLVQPGGSLKLSCAASGFTFNKYAMNWVRQAPGKGMEWVARIRSKYNNYATYYADAVKDRFTISRDDSKNTLYLQMNNLKTEDTAVYYCVRAGNFGSSYISYFAYWGQGTLVTVSSGGGGQGGGGQGGGGQQTVVTQEPSLTVSPGGTVTITCGSSTGAVTSGNYPNWIQKKPGQAPRGLIGGTKFLAPGTPARFSGSLEGGKAALTLSGVQPEDEAEYYCVLYYSNRWVFGSGTKLTVLGGGGQGGGGQGGGGQCPPCPAPELLGGPSVFLFPPKPKDTLMISRTPEVTCVVVDVSHEEPEVKFNWYVDGVEVHNAKTKPCEEQYGSTYRCVSVLTVLHQDWLNGKEYKCKVSNKALPAPIEKTISKAKGQPREPQVYTLPPSREEMTKNQVSLTCLVKGFYPSDIAVEWESNGQPENNYKTTPPVLDSDGSFFLYSKLTVDKSRWQQGNVFSCSVMHEALHNHYTQKSLSLSPGKGGGGQGGGGQGGGGQGGGGQGGGGQGGGGQCPPCPAPELLGGPSVFLFPPKPKDTLMISRTPEVTCVVVDVSHEEPEVKFNWYVDGVEVHNAKTKPCEEQYGSTYRCVSVLTVLHQDWLNGKEYKCKVSNKALPAPIEKTISKAKGQPREPQVYTLPPSREEMTKNQVSLTCLVKGFYPSDIAVEWESNGQPENNYKTTPPVLDSDGSFFLYSKLTVDKSRWQQGNVFSCSVMHEALHNHYTQKSLSLSPGKGGGGQGGGGQGGGGQQVQLVQSGAEVKKPGASVKVSCKASGYTFTSYWMHWVRQAPGQCLEWMGVIRTSTSYTIYNQKFKGRVTMTRDTSTSTVYMELSSLRSEDTAVYYCARSGPGYFDVWGQGTMVTVSSGGGGQGGGGQGGGGQDIQLTQSPSFLSASVGDRVTITCRASENIYSYLAWYQQKPGKAPKLLIYNAKTLAEGVPSRFSGSGSGTEFTLTISSLQPEDFATYYCQHNYGTPYTFGCGTKLEIKSGGGGQEVQLVESGGGLVQPGGSLKLSCAASGFTFNKYAMNWVRQAPGKGMEWVARIRSKYNNYATYYADAVKDRFTISRDDSKNTLYLQMNNLKTEDTAVYYCVRAGNFGSSYISYFAYWGQGTLVTVSSGGGGQGGGGQGGGGQQTVVTQEPSLTVSPGGTVTITCGSSTGAVTSGNYPNWIQKKPGQAPRGLIGGTKFLAPGTPARFSGSLEGGKAALTLSGVQPEDEAEYYCVLYYSNRWVFGSGTKLTVL

SEQ ID NO: 290 - protein, 1496 aa, Synthetic construct
QVQLQESGPGLVKPSETLSLTCTVSGGSISSSSYFWGWIRQPPGKCLEWIGNIYYSGSSNYNPSLKSRVTISVDTSKNQFSLKLSSVTAADTAVYYCARLPRGDRDAFDIWGQGTMVTVSSGGGGQGGGGQGGGGQDIVMTQSPSSLSASVGDRVTITCRASQGISNYLAWYQQKPGKVPKLLIYAASTLQSGVPSRFSGSGSGTDFTLTISSLQPEDFATYYCQQSYSTPFTFGCGTKVEIKSGGGGQEVQLVESGGGLVQPGGSLKLSCAASGFTFNKYAMNWVRQAPGKGMEWVARIRSKYNNYATYYADAVKDRFTISRDDSKNTLYLQMNNLKTEDTAVYYCVRAGNFGSSYISYFAYWGQGTLVTVSSGGGGQGGGGQGGGGQQTVVTQEPSLTVSPGGTVTITCGSSTGAVTSGNYPNWIQKKPGQAPRGLIGGTKFLAPGTPARFSGSLEGGKAALTLSGVQPEDEAEYYCVLYYSNRWVFGSGTKLTVLGGGGQGGGGQGGGGQCPPCPAPELLGGPSVFLFPPKPKDTLMISRTPEVTCVVVDVSHEEPEVKFNWYVDGVEVHNAKTKPCEEQYGSTYRCVSVLTVLHQDWLNGKEYKCKVSNKALPAPIEKTISKAKGQPREPQVYTLPPSREEMTKNQVSLTCLVKGFYPSDIAVEWESNGQPENNYKTTPPVLDSDGSFFLYSKLTVDKSRWQQGNVFSCSVMHEALHNHYTQKSLSLSPGKGGGGQGGGGQGGGGQGGGGQGGGGQGGGGQCPPCPAPELLGGPSVFLFPPKPKDTLMISRTPEVTCVVVDVSHEEPEVKFNWYVDGVEVHNAKTKPCEEQYGSTYRCVSVLTVLHQDWLNGKEYKCKVSNKALPAPIEKTISKAKGQPREPQVYTLPPSREEMTKNQVSLTCLVKGFYPSDIAVEWESNGQPENNYKTTPPVLDSDGSFFLYSKLTVDKSRWQQGNVFSCSVMHEALHNHYTQKSLSLSPGKGGGGQGGGGQGGGGQQVQLVQSGAEVKKPGASVKVSCKASGYTFTNYWMNWVRQAPGQCLEWMGNIHSKAHGTNYNQKFQGRVTMTVDTSSSTAYMELSRLRSDDTAVYYCATRYFYVMDYWGQGTLVTVSSGGGGQGGGGQGGGGQDIQMTQSPSSLSASVGDRVTITCRASQDISNYLNWYQQKPGKVPKLLIYYTSRLHSGVPSRFSGSGSGTDFTLTISSLQPEDVATYYCVQYAQFPLTFGCGTKVEIKSGGGGQEVQLVESGGGLVQPGGSLKLSCAASGFTFNKYAMNWVRQAPGKGMEWVARIRSKYNNYATYYADAVKDRFTISRDDSKNTLYLQMNNLKTEDTAVYYCVRAGNFGSSYISYFAYWGQGTLVTVSSGGGGQGGGGQGGGGQQTVVTQEPSLTVSPGGTVTITCGSSTGAVTSGNYPNWIQKKPGQAPRGLIGGTKFLAPGTPARFSGSLEGGKAALTLSGVQPEDEAEYYCVLYYSNRWVFGSGTKLTVL

SEQ ID NO: 291 - protein, 1484 aa, Synthetic construct
QVQLQESGPGLVKPSETLSLTCTVSGGSISSSSYFWGWIRQPPGKCLEWIGNIYYSGSSNYNPSLKSRVTISVDTSKNQFSLKLSSVTAADTAVYYCARLPRGDRDAFDIWGQGTMVTVSSGGGGSGGGGSGGGGSDIVMTQSPSSLSASVGDRVTITCRASQGISNYLAWYQQKPGKVPKLLIYAASTLQSGVPSRFSGSGSGTDFTLTISSLQPEDFATYYCQQSYSTPFTFGCGTKVEIKSGGGGSEVQLVESGGGLVQPGGSLKLSCAASGFTFNKYAMNWVRQAPGKGMEWVARIRSKYNNYATYYADAVKDRFTISRDDSKNTLYLQMNNLKTEDTAVYYCVRAGNFGSSYISYFAYWGQGTLVTVSSGGGGSGGGGSGGGGSQTVVTQEPSLTVSPGGTVTITCGSSTGAVTSGNYPNWIQKKPGQAPRGLIGGTKFLAPGTPARFSGSLEGGKAALTLSGVQPEDEAEYYCVLYYSNRWVFGSGTKLTVLGGGGDKTHTCPPCPAPELLGGPSVFLFPPKPKDTLMISRTPEVTCVVVDVSHEDPEVKFNWYVDGVEVHNAKTKPCEEQYGSTYRCVSVLTVLHQDWLNGKEYKCKVSNKALPAPIEKTISKAKGQPREPQVYTLPPSREEMTKNQVSLTCLVKGFYPSDIAVEWESNGQPENNYKTTPPVLDSDGSFFLYSKLTVDKSRWQQGNVFSCSVMHEALHNHYTQKSLSLSPGKGGGGSGGGGSGGGGSGGGGSGGGGSGGGGSDKTHTCPPCPAPELLGGPSVFLFPPKPKDTLMISRTPEVTCVVVDVSHEDPEVKFNWYVDGVEVHNAKTKPCEEQYGSTYRCVSVLTVLHQDWLNGKEYKCKVSNKALPAPIEKTISKAKGQPREPQVYTLPPSREEMTKNQVSLTCLVKGFYPSDIAVEWESNGQPENNYKTTPPVLDSDGSFFLYSKLTVDKSRWQQGNVFSCSVMHEALHNHYTQKSLSLSPGKGGGGQVQLVQSGAEVKKPGASVKVSCKASGYTFTNYWMNWVRQAPGQCLEWMGNIAYGVKGTNYNQKFQGRVTMTVDTSSSTAYMELSRLRSDDTAVYYCATRYFYVMDYWGQGTLVTVSSGGGGSGGGGSGGGGSDIQMTQSPSSLSASVGDRVTITCRASQDISNYLNWYQQKPGKVPKLLIYYTSRLHSGVPSRFSGSGSGTDFTLTISSLQPEDVATYYCVQYAQFPLTFGCGTKVEIKSGGGGSEVQLVESGGGLVQPGGSLKLSCAASGFTFNKYAMNWVRQAPGKGMEWVARIRSKYNNYATYYADAVKDRFTISRDDSKNTLYLQMNNLKTEDTAVYYCVRAGNFGSSYISYFAYWGQGTLVTVSSGGGGSGGGGSGGGGSQTVVTQEPSLTVSPGGTVTITCGSSTGAVTSGNYPNWIQKKPGQAPRGLIGGTKFLAPGTPARFSGSLEGGKAALTLSGVQPEDEAEYYCVLYYSNRWVFGSGTKLTVL

SEQ ID NO: 292 - protein, 1478 aa, Synthetic construct
QVQLQESGPGLVKPSETLSLTCTVSGGSISSSSYFWGWIRQPPGKCLEWIGNIYYSGSSNYNPSLKSRVTISVDTSKNQFSLKLSSVTAADTAVYYCARLPRGDRDAFDIWGQGTMVTVSSGGGGQGGGGQGGGGQDIVMTQSPSSLSASVGDRVTITCRASQGISNYLAWYQQKPGKVPKLLIYAASTLQSGVPSRFSGSGSGTDFTLTISSLQPEDFATYYCQQSYSTPFTFGCGTKVEIKSGGGGQEVQLVESGGGLVQPGGSLKLSCAASGFTFNKYAMNWVRQAPGKGMEWVARIRSKYNNYATYYADAVKDRFTISRDDSKNTLYLQMNNLKTEDTAVYYCVRAGNFGSSYISYFAYWGQGTLVTVSSGGGGQGGGGQGGGGQQTVVTQEPSLTVSPGGTVTITCGSSTGAVTSGNYPNWIQKKPGQAPRGLIGGTKFLAPGTPARFSGSLEGGKAALTLSGVQPEDEAEYYCVLYYSNRWVFGSGTKLTVLGGGGCPPCPAPELLGGPSVFLFPPKPKDTLMISRTPEVTCVVVDVSHEEPEVKFNWYVDGVEVHNAKTKPCEEQYGSTYRCVSVLTVLHQDWLNGKEYKCKVSNKALPAPIEKTISKAKGQPREPQVYTLPPSREEMTKNQVSLTCLVKGFYPSDIAVEWESNGQPENNYKTTPPVLDSDGSFFLYSKLTVDKSRWQQGNVFSCSVMHEALHNHYTQKSLSLSPGKGGGGQGGGGQGGGGQGGGGQGGGGQGGGGQCPPCPAPELLGGPSVFLFPPKPKDTLMISRTPEVTCVVVDVSHEEPEVKFNWYVDGVEVHNAKTKPCEEQYGSTYRCVSVLTVLHQDWLNGKEYKCKVSNKALPAPIEKTISKAKGQPREPQVYTLPPSREEMTKNQVSLTCLVKGFYPSDIAVEWESNGQPENNYKTTPPVLDSDGSFFLYSKLTVDKSRWQQGNVFSCSVMHEALHNHYTQKSLSLSPGKGGGGQVQLVQSGAEVVKPGASVKVSCKASGYTFTSSWMNWVRQAPGQCLEWMGRIYTGTGETKYSGKFQGRVTITRDTSASTAYMELSSLTSEDTAVYYCARQRDYGALYAMDYWGQGTLVTVSSGGGGQGGGGQGGGGQDIQLTQSPSFLSASVGDRVTITCRASDDIYSYLAWYQQKPGKAPKLLVYNAKTLAEGVPSRFSGSGSGTEFTLTISSLQPEDFATYYCQNHDRTPFTFGCGTKVDIKSGGGGQEVQLVESGGGLVQPGGSLKLSCAASGFTFNKYAMNWVRQAPGKGMEWVARIRSKYNNYATYYADAVKDRFTISRDDSKNTLYLQMNNLKTEDTAVYYCVRAGNFGSSYISYFAYWGQGTLVTVSSGGGGQGGGGQGGGGQQTVVTQEPSLTVSPGGTVTITCGSSTGAVTSGNYPNWIQKKPGQAPRGLIGGTKFLAPGTPARFSGSLEGGKAALTLSGVQPEDEAEYYCVLYYSNRWVFGSGTKLTVL

SEQ ID NO: 293 - protein, 1474 aa, Synthetic construct
QVQLQESGPGLVKPSETLSLTCTVSGGSISSSSYFWGWIRQPPGKCLEWIGNIYYSGSSNYNPSLKSRVTISVDTSKNQFSLKLSSVTAADTAVYYCARLPRGDRDAFDIWGQGTMVTVSSGGGGQGGGGQGGGGQDIVMTQSPSSLSASVGDRVTITCRASQGISNYLAWYQQKPGKVPKLLIYAASTLQSGVPSRFSGSGSGTDFTLTISSLQPEDFATYYCQQSYSTPFTFGCGTKVEIKSGGGGQEVQLVESGGGLVQPGGSLKLSCAASGFTFNKYAMNWVRQAPGKGMEWVARIRSKYNNYATYYADAVKDRFTISRDDSKNTLYLQMNNLKTEDTAVYYCVRAGNFGSSYISYFAYWGQGTLVTVSSGGGGQGGGGQGGGGQQTVVTQEPSLTVSPGGTVTITCGSSTGAVTSGNYPNWIQKKPGQAPRGLIGGTKFLAPGTPARFSGSLEGGKAALTLSGVQPEDEAEYYCVLYYSNRWVFGSGTKLTVLGGGGCPPCPAPELLGGPSVFLFPPKPKDTLMISRTPEVTCVVVDVSHEEPEVKFNWYVDGVEVHNAKTKPCEEQYGSTYRCVSVLTVLHQDWLNGKEYKCKVSNKALPAPIEKTISKAKGQPREPQVYTLPPSREEMTKNQVSLTCLVKGFYPSDIAVEWESNGQPENNYKTTPPVLDSDGSFFLYSKLTVDKSRWQQGNVFSCSVMHEALHNHYTQKSLSLSPGKGGGGQGGGGQGGGGQGGGGQGGGGQGGGGQCPPCPAPELLGGPSVFLFPPKPKDTLMISRTPEVTCVVVDVSHEEPEVKFNWYVDGVEVHNAKTKPCEEQYGSTYRCVSVLTVLHQDWLNGKEYKCKVSNKALPAPIEKTISKAKGQPREPQVYTLPPSREEMTKNQVSLTCLVKGFYPSDIAVEWESNGQPENNYKTTPPVLDSDGSFFLYSKLTVDKSRWQQGNVFSCSVMHEALHNHYTQKSLSLSPGKGGGGQVQLVQSGAEVKKPGASVKVSCKASGYTFTNYWMNWVRQAPGQCLEWMGNIHSKAHGTNYNQKFQGRVTMTVDTSSSTAYMELSRLRSDDTAVYYCATRYFYVMDYWGQGTLVTVSSGGGGQGGGGQGGGGQDIQMTQSPSSLSASVGDRVTITCRASQDISNYLNWYQQKPGKVPKLLIYYTSRLHSGVPSRFSGSGSGTDFTLTISSLQPEDVATYYCVQYAQFPLTFGCGTKVEIKSGGGGQEVQLVESGGGLVQPGGSLKLSCAASGFTFNKYAMNWVRQAPGKGMEWVARIRSKYNNYATYYADAVKDRFTISRDDSKNTLYLQMNNLKTEDTAVYYCVRAGNFGSSYISYFAYWGQGTLVTVSSGGGGQGGGGQGGGGQQTVVTQEPSLTVSPGGTVTITCGSSTGAVTSGNYPNWIQKKPGQAPRGLIGGTKFLAPGTPARFSGSLEGGKAALTLSGVQPEDEAEYYCVLYYSNRWVFGSGTKLTVL

SEQ ID NO: 294 - protein, 1518 aa, Synthetic construct
QVQLQESGPGLVKPSETLSLTCTVSGGSISSSSYFWGWIRQPPGKCLEWIGNIYYSGSSNYNPSLKSRVTISVDTSKNQFSLKLSSVTAADTAVYYCARLPRGDRDAFDIWGQGTMVTVSSGGGGSGGGGSGGGGSDIVMTQSPSSLSASVGDRVTITCRASQGISNYLAWYQQKPGKVPKLLIYAASTLQSGVPSRFSGSGSGTDFTLTISSLQPEDFATYYCQQSYSTPFTFGCGTKVEIKSGGGGSEVQLVESGGGLVQPGGSLKLSCAASGFTFNKYAMNWVRQAPGKGMEWVARIRSKYNNYATYYADAVKDRFTISRDDSKNTLYLQMNNLKTEDTAVYYCVRAGNFGSSYISYFAYWGQGTLVTVSSGGGGSGGGGSGGGGSQTVVTQEPSLTVSPGGTVTITCGSSTGAVTSGNYPNWIQKKPGQAPRGLIGGTKFLAPGTPARFSGSLEGGKAALTLSGVQPEDEAEYYCVLYYSNRWVFGSGTKLTVLGGGGSGGGGSGGGGSDKTHTCPPCPAPELLGGPSVFLFPPKPKDTLMISRTPEVTCVVVDVSHEDPEVKFNWYVDGVEVHNAKTKPCEEQYGSTYRCVSVLTVLHQDWLNGKEYKCKVSNKALPAPIEKTISKAKGQPREPQVYTLPPSREEMTKNQVSLTCLVKGFYPSDIAVEWESNGQPENNYKTTPPVLDSDGSFFLYSKLTVDKSRWQQGNVFSCSVMHEALHNHYTQKSLSLSPGKGGGGSGGGGSGGGGSGGGGSGGGGSGGGGSDKTHTCPPCPAPELLGGPSVFLFPPKPKDTLMISRTPEVTCVVVDVSHEDPEVKFNWYVDGVEVHNAKTKPCEEQYGSTYRCVSVLTVLHQDWLNGKEYKCKVSNKALPAPIEKTISKAKGQPREPQVYTLPPSREEMTKNQVSLTCLVKGFYPSDIAVEWESNGQPENNYKTTPPVLDSDGSFFLYSKLTVDKSRWQQGNVFSCSVMHEALHNHYTQKSLSLSPGKGGGGSGGGGSGGGGSEVQLLESGGGLVQPGGSLRLSCAASGFSFSSYPINWVRQAPGKCLEWVGVIWTGGGTNYASSVKGRFTISRDNSKNTVYLQMNSLRAEDTAVYYCAKSRGVYDFKGRGAMDYWGQGTLVTVSSGGGGSGGGGSGGGGSDIVMTQSPDSLAVSLGERATINCKSSQSLLYSSNQKNYFAWYQQKPGQPPKLLIYWASTRESGVPDRFSGSGSGTDFTLTISSLQAEDVAVYYCQQYYSYPYTFGCGTKLEIKSGGGGSEVQLVESGGGLVQPGGSLKLSCAASGFTFNKYAMNWVRQAPGKGMEWVARIRSKYNNYATYYADAVKDRFTISRDDSKNTLYLQMNNLKTEDTAVYYCVRAGNFGSSYISYFAYWGQGTLVTVSSGGGGSGGGGSGGGGSQTVVTQEPSLTVSPGGTVTITCGSSTGAVTSGNYPNWIQKKPGQAPRGLIGGTKFLAPGTPARFSGSLEGGKAALTLSGVQPEDEAEYYCVLYYSNRWVFGSGTKLTVL

SEQ ID NO: 295 - protein, 1474 aa, Synthetic construct
QVQLQESGPGLVKPSETLSLTCTVSGGSISSSSYFWGWIRQPPGKCLEWIGNIYYSGSSNYNPSLKSRVTISVDTSKNQFSLKLSSVTAADTAVYYCARLPRGDRDAFDIWGQGTMVTVSSGGGGQGGGGQGGGGQDIVMTQSPSSLSASVGDRVTITCRASQGISNYLAWYQQKPGKVPKLLIYAASTLQSGVPSRFSGSGSGTDFTLTISSLQPEDFATYYCQQSYSTPFTFGCGTKVEIKSGGGGQEVQLVESGGGLVQPGGSLKLSCAASGFTFNKYAINWVREAPGKGLEWVARIRSKYNNYATYYADAVKDRFTISRDDSKNTAYLQMNNLKTEDTAVYYCVRNANFGTSYISYFAYWGQGTLVTVSSGGGGQGGGGQGGGGQQTVVTQEPSLTVSPGGTVTLTCGSSTGAVTSGNYPNWVQKKPGQAPRGLIGGTKFLAPGTPARFSGSLLGGKAALTLSGVQPEDEAEYYCVLWYSNRWVFGSGTKLTVLGGGGCPPCPAPELLGGPSVFLFPPKPKDTLMISRTPEVTCVVVDVSHEEPEVKFNWYVDGVEVHNAKTKPCEEQYGSTYRCVSVLTVLHQDWLNGKEYKCKVSNKALPAPIEKTISKAKGQPREPQVYTLPPSREEMTKNQVSLTCLVKGFYPSDIAVEWESNGQPENNYKTTPPVLDSDGSFFLYSKLTVDKSRWQQGNVFSCSVMHEALHNHYTQKSLSLSPGKGGGGQGGGGQGGGGQGGGGQGGGGQGGGGQCPPCPAPELLGGPSVFLFPPKPKDTLMISRTPEVTCVVVDVSHEEPEVKFNWYVDGVEVHNAKTKPCEEQYGSTYRCVSVLTVLHQDWLNGKEYKCKVSNKALPAPIEKTISKAKGQPREPQVYTLPPSREEMTKNQVSLTCLVKGFYPSDIAVEWESNGQPENNYKTTPPVLDSDGSFFLYSKLTVDKSRWQQGNVFSCSVMHEALHNHYTQKSLSLSPGKGGGGQVQLVQSGAEVKKPGASVKVSCKASGYTFTNYWMNWVRQAPGQCLEWMGNIHSKAHGTNYNQKFQGRVTMTVDTSSSTAYMELSRLRSDDTAVYYCATRYFYVMDYWGQGTLVTVSSGGGGQGGGGQGGGGQDIQMTQSPSSLSASVGDRVTITCRASQDISNYLNWYQQKPGKVPKLLIYYTSRLHSGVPSRFSGSGSGTDFTLTISSLQPEDVATYYCVQYAQFPLTFGCGTKVEIKSGGGGQEVQLVESGGGLVQPGGSLKLSCAASGFTFNKYAINWVREAPGKGLEWVARIRSKYNNYATYYADAVKDRFTISRDDSKNTAYLQMNNLKTEDTAVYYCVRNANFGTSYISYFAYWGQGTLVTVSSGGGGQGGGGQGGGGQQTVVTQEPSLTVSPGGTVTLTCGSSTGAVTSGNYPNWVQKKPGQAPRGLIGGTKFLAPGTPARFSGSLLGGKAALTLSGVQPEDEAEYYCVLWYSNRWVFGSGTKLTVL

SEQ ID NO: 296 - protein, 1508 aa, Synthetic construct
QVQLQESGPGLVKPSETLSLTCTVSGGSISSSSYFWGWIRQPPGKCLEWIGNIYYSGSSNYNPSLKSRVTISVDTSKNQFSLKLSSVTAADTAVYYCARLPRGDRDAFDIWGQGTMVTVSSGGGGQGGGGQGGGGQDIVMTQSPSSLSASVGDRVTITCRASQGISNYLAWYQQKPGKVPKLLIYAASTLQSGVPSRFSGSGSGTDFTLTISSLQPEDFATYYCQQSYSTPFTFGCGTKVEIKSGGGGQEVQLVESGGGLVQPGGSLKLSCAASGFTFNKYAINWVREAPGKGLEWVARIRSKYNNYATYYADAVKDRFTISRDDSKNTAYLQMNNLKTEDTAVYYCVRNANFGTSYISYFAYWGQGTLVTVSSGGGGQGGGGQGGGGQQTVVTQEPSLTVSPGGTVTLTCGSSTGAVTSGNYPNWVQKKPGQAPRGLIGGTKFLAPGTPARFSGSLLGGKAALTLSGVQPEDEAEYYCVLWYSNRWVFGSGTKLTVLGGGGQGGGGQGGGGQCPPCPAPELLGGPSVFLFPPKPKDTLMISRTPEVTCVVVDVSHEEPEVKFNWYVDGVEVHNAKTKPCEEQYGSTYRCVSVLTVLHQDWLNGKEYKCKVSNKALPAPIEKTISKAKGQPREPQVYTLPPSREEMTKNQVSLTCLVKGFYPSDIAVEWESNGQPENNYKTTPPVLDSDGSFFLYSKLTVDKSRWQQGNVFSCSVMHEALHNHYTQKSLSLSPGKGGGGQGGGGQGGGGQGGGGQGGGGQGGGGQCPPCPAPELLGGPSVFLFPPKPKDTLMISRTPEVTCVVVDVSHEEPEVKFNWYVDGVEVHNAKTKPCEEQYGSTYRCVSVLTVLHQDWLNGKEYKCKVSNKALPAPIEKTISKAKGQPREPQVYTLPPSREEMTKNQVSLTCLVKGFYPSDIAVEWESNGQPENNYKTTPPVLDSDGSFFLYSKLTVDKSRWQQGNVFSCSVMHEALHNHYTQKSLSLSPGKGGGGQGGGGQGGGGQEVQLLESGGGLVQPGGSLRLSCAASGFSFSSYPINWVRQAPGKCLEWVGVIWTGGGTNYASSVKGRFTISRDNSKNTVYLQMNSLRAEDTAVYYCAKSRGVYDFKGRGAMDYWGQGTLVTVSSGGGGQGGGGQGGGGQDIVMTQSPDSLAVSLGERATINCKSSQSLLYSSNQKNYFAWYQQKPGQPPKLLIYWASTRESGVPDRFSGSGSGTDFTLTISSLQAEDVAVYYCQQYYSYPYTFGCGTKLEIKSGGGGQEVQLVESGGGLVQPGGSLKLSCAASGFTFNKYAINWVREAPGKGLEWVARIRSKYNNYATYYADAVKDRFTISRDDSKNTAYLQMNNLKTEDTAVYYCVRNANFGTSYISYFAYWGQGTLVTVSSGGGGQGGGGQGGGGQQTVVTQEPSLTVSPGGTVTLTCGSSTGAVTSGNYPNWVQKKPGQAPRGLIGGTKFLAPGTPARFSGSLLGGKAALTLSGVQPEDEAEYYCVLWYSNRWVFGSGTKLTVL

SEQ ID NO: 297 - protein, 1496 aa, Synthetic construct
QVQLQESGPGLVKPSETLSLTCTVSGGSISSSSYFWGWIRQPPGKCLEWIGNIYYSGSSNYNPSLKSRVTISVDTSKNQFSLKLSSVTAADTAVYYCARLPRGDRDAFDIWGQGTMVTVSSGGGGQGGGGQGGGGQDIVMTQSPSSLSASVGDRVTITCRASQGISNYLAWYQQKPGKVPKLLIYAASTLQSGVPSRFSGSGSGTDFTLTISSLQPEDFATYYCQQSYSTPFTFGCGTKVEIKSGGGGQEVQLVESGGGLVQPGGSLKLSCAASGFTFNKYAINWVREAPGKGLEWVARIRSKYNNYATYYADAVKDRFTISRDDSKNTAYLQMNNLKTEDTAVYYCVRNANFGTSYISYFAYWGQGTLVTVSSGGGGQGGGGQGGGGQQTVVTQEPSLTVSPGGTVTLTCGSSTGAVTSGNYPNWVQKKPGQAPRGLIGGTKFLAPGTPARFSGSLLGGKAALTLSGVQPEDEAEYYCVLWYSNRWVFGSGTKLTVLGGGGQGGGGQGGGGQCPPCPAPELLGGPSVFLFPPKPKDTLMISRTPEVTCVVVDVSHEEPEVKFNWYVDGVEVHNAKTKPCEEQYGSTYRCVSVLTVLHQDWLNGKEYKCKVSNKALPAPIEKTISKAKGQPREPQVYTLPPSREEMTKNQVSLTCLVKGFYPSDIAVEWESNGQPENNYKTTPPVLDSDGSFFLYSKLTVDKSRWQQGNVFSCSVMHEALHNHYTQKSLSLSPGKGGGGQGGGGQGGGGQGGGGQGGGGQGGGGQCPPCPAPELLGGPSVFLFPPKPKDTLMISRTPEVTCVVVDVSHEEPEVKFNWYVDGVEVHNAKTKPCEEQYGSTYRCVSVLTVLHQDWLNGKEYKCKVSNKALPAPIEKTISKAKGQPREPQVYTLPPSREEMTKNQVSLTCLVKGFYPSDIAVEWESNGQPENNYKTTPPVLDSDGSFFLYSKLTVDKSRWQQGNVFSCSVMHEALHNHYTQKSLSLSPGKGGGGQGGGGQGGGGQQVQLVQSGAEVKKPGASVKVSCKASGYTFTSYWMHWVRQAPGQCLEWMGVIRTSTSYTIYNQKFKGRVTMTRDTSTSTVYMELSSLRSEDTAVYYCARSGPGYFDVWGQGTMVTVSSGGGGQGGGGQGGGGQDIQLTQSPSFLSASVGDRVTITCRASENIYSYLAWYQQKPGKAPKLLIYNAKTLAEGVPSRFSGSGSGTEFTLTISSLQPEDFATYYCQHNYGTPYTFGCGTKLEIKSGGGGQEVQLVESGGGLVQPGGSLKLSCAASGFTFNKYAINWVREAPGKGLEWVARIRSKYNNYATYYADAVKDRFTISRDDSKNTAYLQMNNLKTEDTAVYYCVRNANFGTSYISYFAYWGQGTLVTVSSGGGGQGGGGQGGGGQQTVVTQEPSLTVSPGGTVTLTCGSSTGAVTSGNYPNWVQKKPGQAPRGLIGGTKFLAPGTPARFSGSLLGGKAALTLSGVQPEDEAEYYCVLWYSNRWVFGSGTKLTVL

SEQ ID NO: 298 - protein, 1484 aa, Synthetic construct
QVQLQESGPGLVKPSETLSLTCTVSGGSISSSSYFWGWIRQPPGKCLEWIGNIYYSGSSNYNPSLKSRVTISVDTSKNQFSLKLSSVTAADTAVYYCARLPRGDRDAFDIWGQGTMVTVSSGGGGSGGGGSGGGGSDIVMTQSPSSLSASVGDRVTITCRASQGISNYLAWYQQKPGKVPKLLIYAASTLQSGVPSRFSGSGSGTDFTLTISSLQPEDFATYYCQQSYSTPFTFGCGTKVEIKSGGGGSEVQLVESGGGLVQPGGSLKLSCAASGFTFNKYAMNWVRQAPGKGMEWVARIRSKYNNYATYYADAVKDRFTISRDDSKNTLYLQMNNLKTEDTAVYYCVRAGNFGSSYISYFAYWGQGTLVTVSSGGGGSGGGGSGGGGSQTVVTQEPSLTVSPGGTVTITCGSSTGAVTSGNYPNWIQKKPGQAPRGLIGGTKFLAPGTPARFSGSLEGGKAALTLSGVQPEDEAEYYCVLYYSNRWVFGSGTKLTVLGGGGDKTHTCPPCPAPELLGGPSVFLFPPKPKDTLMISRTPEVTCVVVDVSHEDPEVKFNWYVDGVEVHNAKTKPCEEQYGSTYRCVSVLTVLHQDWLNGKEYKCKVSNKALPAPIEKTISKAKGQPREPQVYTLPPSREEMTKNQVSLTCLVKGFYPSDIAVEWESNGQPENNYKTTPPVLDSDGSFFLYSKLTVDKSRWQQGNVFSCSVMHEALHNHYTQKSLSLSPGKGGGGSGGGGSGGGGSGGGGSGGGGSGGGGSDKTHTCPPCPAPELLGGPSVFLFPPKPKDTLMISRTPEVTCVVVDVSHEDPEVKFNWYVDGVEVHNAKTKPCEEQYGSTYRCVSVLTVLHQDWLNGKEYKCKVSNKALPAPIEKTISKAKGQPREPQVYTLPPSREEMTKNQVSLTCLVKGFYPSDIAVEWESNGQPENNYKTTPPVLDSDGSFFLYSKLTVDKSRWQQGNVFSCSVMHEALHNHYTQKSLSLSPGKGGGGQVQLVQSGAEVKKPGASVKVSCKASGYTFTSYWMHWVRQAPGQCLEWMGVIYTSGSYTIYNQKFQGRVTMTRDTSTSTAYMELSSLRSEDTAVYYCARSGPGYFDVWGQGTMVTVSSGGGGSGGGGSGGGGSDIQLTQSPSFLSASVGDRVTITCRASGNIHNYLAWYQQKPGKAPKLLIYNAKTLAEGVPSRFSGSGSGTEFTLKISSLQPEDFATYYCQHFAWTPYTFGCGTKLEIKSGGGGSEVQLVESGGGLVQPGGSLKLSCAASGFTFNKYAMNWVRQAPGKGMEWVARIRSKYNNYATYYADAVKDRFTISRDDSKNTLYLQMNNLKTEDTAVYYCVRAGNFGSSYISYFAYWGQGTLVTVSSGGGGSGGGGSGGGGSQTVVTQEPSLTVSPGGTVTITCGSSTGAVTSGNYPNWIQKKPGQAPRGLIGGTKFLAPGTPARFSGSLEGGKAALTLSGVQPEDEAEYYCVLYYSNRWVFGSGTKLTVL

SEQ ID NO: 299 - protein, 1506 aa, Synthetic construct
QVQLQESGPGLVKPSETLSLTCTVSGGSISSSSYFWGWIRQPPGKCLEWIGNIYYSGSSNYNPSLKSRVTISVDTSKNQFSLKLSSVTAADTAVYYCARLPRGDRDAFDIWGQGTMVTVSSGGGGSGGGGSGGGGSDIVMTQSPSSLSASVGDRVTITCRASQGISNYLAWYQQKPGKVPKLLIYAASTLQSGVPSRFSGSGSGTDFTLTISSLQPEDFATYYCQQSYSTPFTFGCGTKVEIKSGGGGSEVQLVESGGGLVQPGGSLKLSCAASGFTFNKYAMNWVRQAPGKGMEWVARIRSKYNNYATYYADAVKDRFTISRDDSKNTLYLQMNNLKTEDTAVYYCVRAGNFGSSYISYFAYWGQGTLVTVSSGGGGSGGGGSGGGGSQTVVTQEPSLTVSPGGTVTITCGSSTGAVTSGNYPNWIQKKPGQAPRGLIGGTKFLAPGTPARFSGSLEGGKAALTLSGVQPEDEAEYYCVLYYSNRWVFGSGTKLTVLGGGGSGGGGSGGGGSDKTHTCPPCPAPELLGGPSVFLFPPKPKDTLMISRTPEVTCVVVDVSHEDPEVKFNWYVDGVEVHNAKTKPCEEQYGSTYRCVSVLTVLHQDWLNGKEYKCKVSNKALPAPIEKTISKAKGQPREPQVYTLPPSREEMTKNQVSLTCLVKGFYPSDIAVEWESNGQPENNYKTTPPVLDSDGSFFLYSKLTVDKSRWQQGNVFSCSVMHEALHNHYTQKSLSLSPGKGGGGSGGGGSGGGGSGGGGSGGGGSGGGGSDKTHTCPPCPAPELLGGPSVFLFPPKPKDTLMISRTPEVTCVVVDVSHEDPEVKFNWYVDGVEVHNAKTKPCEEQYGSTYRCVSVLTVLHQDWLNGKEYKCKVSNKALPAPIEKTISKAKGQPREPQVYTLPPSREEMTKNQVSLTCLVKGFYPSDIAVEWESNGQPENNYKTTPPVLDSDGSFFLYSKLTVDKSRWQQGNVFSCSVMHEALHNHYTQKSLSLSPGKGGGGSGGGGSGGGGSQVQLVQSGAEVKKPGASVKVSCKASGYTFTSYWMHWVRQAPGQCLEWMGVIYTSGSYTIYNQKFQGRVTMTRDTSTSTAYMELSSLRSEDTAVYYCARSGPGYFDVWGQGTMVTVSSGGGGSGGGGSGGGGSDIQLTQSPSFLSASVGDRVTITCRASGNIHNYLAWYQQKPGKAPKLLIYNAKTLAEGVPSRFSGSGSGTEFTLKISSLQPEDFATYYCQHFAWTPYTFGCGTKLEIKSGGGGSEVQLVESGGGLVQPGGSLKLSCAASGFTFNKYAMNWVRQAPGKGMEWVARIRSKYNNYATYYADAVKDRFTISRDDSKNTLYLQMNNLKTEDTAVYYCVRAGNFGSSYISYFAYWGQGTLVTVSSGGGGSGGGGSGGGGSQTVVTQEPSLTVSPGGTVTITCGSSTGAVTSGNYPNWIQKKPGQAPRGLIGGTKFLAPGTPARFSGSLEGGKAALTLSGVQPEDEAEYYCVLYYSNRWVFGSGTKLTVL

SEQ ID NO: 300 - protein, 1474 aa, Synthetic construct
QVQLQESGPGLVKPSETLSLTCTVSGGSISSSSYFWGWIRQPPGKCLEWIGNIYYSGSSNYNPSLKSRVTISVDTSKNQFSLKLSSVTAADTAVYYCARLPRGDRDAFDIWGQGTMVTVSSGGGGQGGGGQGGGGQDIVMTQSPSSLSASVGDRVTITCRASQGISNYLAWYQQKPGKVPKLLIYAASTLQSGVPSRFSGSGSGTDFTLTISSLQPEDFATYYCQQSYSTPFTFGCGTKVEIKSGGGGQEVQLVESGGGLVQPGGSLKLSCAASGFTFNKYAINWVREAPGKGLEWVARIRSKYNNYATYYADAVKDRFTISRDDSKNTAYLQMNNLKTEDTAVYYCVRNANFGTSYISYFAYWGQGTLVTVSSGGGGQGGGGQGGGGQQTVVTQEPSLTVSPGGTVTLTCGSSTGAVTSGNYPNWVQKKPGQAPRGLIGGTKFLAPGTPARFSGSLLGGKAALTLSGVQPEDEAEYYCVLWYSNRWVFGSGTKLTVLGGGGCPPCPAPELLGGPSVFLFPPKPKDTLMISRTPEVTCVVVDVSHEEPEVKFNWYVDGVEVHNAKTKPCEEQYGSTYRCVSVLTVLHQDWLNGKEYKCKVSNKALPAPIEKTISKAKGQPREPQVYTLPPSREEMTKNQVSLTCLVKGFYPSDIAVEWESNGQPENNYKTTPPVLDSDGSFFLYSKLTVDKSRWQQGNVFSCSVMHEALHNHYTQKSLSLSPGKGGGGQGGGGQGGGGQGGGGQGGGGQGGGGQCPPCPAPELLGGPSVFLFPPKPKDTLMISRTPEVTCVVVDVSHEEPEVKFNWYVDGVEVHNAKTKPCEEQYGSTYRCVSVLTVLHQDWLNGKEYKCKVSNKALPAPIEKTISKAKGQPREPQVYTLPPSREEMTKNQVSLTCLVKGFYPSDIAVEWESNGQPENNYKTTPPVLDSDGSFFLYSKLTVDKSRWQQGNVFSCSVMHEALHNHYTQKSLSLSPGKGGGGQVQLVQSGAEVKKPGASVKVSCKASGYTFTNYWMNWVRQAPGQCLEWMGNIAYGVKGTNYNQKFQGRVTMTVDTSSSTAYMELSRLRSDDTAVYYCATRYFYVMDYWGQGTLVTVSSGGGGQGGGGQGGGGQDIQMTQSPSSLSASVGDRVTITCRASQDISNYLNWYQQKPGKVPKLLIYYTSRLHSGVPSRFSGSGSGTDFTLTISSLQPEDVATYYCVQYAQFPLTFGCGTKVEIKSGGGGQEVQLVESGGGLVQPGGSLKLSCAASGFTFNKYAINWVREAPGKGLEWVARIRSKYNNYATYYADAVKDRFTISRDDSKNTAYLQMNNLKTEDTAVYYCVRNANFGTSYISYFAYWGQGTLVTVSSGGGGQGGGGQGGGGQQTVVTQEPSLTVSPGGTVTLTCGSSTGAVTSGNYPNWVQKKPGQAPRGLIGGTKFLAPGTPARFSGSLLGGKAALTLSGVQPEDEAEYYCVLWYSNRWVFGSGTKLTVL

SEQ ID NO: 301 - protein, 1506 aa, Synthetic construct
QVQLQESGPGLVKPSETLSLTCTVSGGSISSSSYFWGWIRQPPGKCLEWIGNIYYSGSSNYNPSLKSRVTISVDTSKNQFSLKLSSVTAADTAVYYCARLPRGDRDAFDIWGQGTMVTVSSGGGGSGGGGSGGGGSDIVMTQSPSSLSASVGDRVTITCRASQGISNYLAWYQQKPGKVPKLLIYAASTLQSGVPSRFSGSGSGTDFTLTISSLQPEDFATYYCQQSYSTPFTFGCGTKVEIKSGGGGSEVQLVESGGGLVQPGGSLKLSCAASGFTFNKYAMNWVRQAPGKGMEWVARIRSKYNNYATYYADAVKDRFTISRDDSKNTLYLQMNNLKTEDTAVYYCVRAGNFGSSYISYFAYWGQGTLVTVSSGGGGSGGGGSGGGGSQTVVTQEPSLTVSPGGTVTITCGSSTGAVTSGNYPNWIQKKPGQAPRGLIGGTKFLAPGTPARFSGSLEGGKAALTLSGVQPEDEAEYYCVLYYSNRWVFGSGTKLTVLGGGGSGGGGSGGGGSDKTHTCPPCPAPELLGGPSVFLFPPKPKDTLMISRTPEVTCVVVDVSHEDPEVKFNWYVDGVEVHNAKTKPCEEQYGSTYRCVSVLTVLHQDWLNGKEYKCKVSNKALPAPIEKTISKAKGQPREPQVYTLPPSREEMTKNQVSLTCLVKGFYPSDIAVEWESNGQPENNYKTTPPVLDSDGSFFLYSKLTVDKSRWQQGNVFSCSVMHEALHNHYTQKSLSLSPGKGGGGSGGGGSGGGGSGGGGSGGGGSGGGGSDKTHTCPPCPAPELLGGPSVFLFPPKPKDTLMISRTPEVTCVVVDVSHEDPEVKFNWYVDGVEVHNAKTKPCEEQYGSTYRCVSVLTVLHQDWLNGKEYKCKVSNKALPAPIEKTISKAKGQPREPQVYTLPPSREEMTKNQVSLTCLVKGFYPSDIAVEWESNGQPENNYKTTPPVLDSDGSFFLYSKLTVDKSRWQQGNVFSCSVMHEALHNHYTQKSLSLSPGKGGGGSGGGGSGGGGSQVQLVQSGAEVKKPGASVKVSCKASGYTFTNYWMNWVRQAPGQCLEWMGNIAYGVKGTNYNQKFQGRVTMTVDTSSSTAYMELSRLRSDDTAVYYCATRYFYVMDYWGQGTLVTVSSGGGGSGGGGSGGGGSDIQMTQSPSSLSASVGDRVTITCRASQDISNYLNWYQQKPGKVPKLLIYYTSRLHSGVPSRFSGSGSGTDFTLTISSLQPEDVATYYCVQYAQFPLTFGCGTKVEIKSGGGGSEVQLVESGGGLVQPGGSLKLSCAASGFTFNKYAMNWVRQAPGKGMEWVARIRSKYNNYATYYADAVKDRFTISRDDSKNTLYLQMNNLKTEDTAVYYCVRAGNFGSSYISYFAYWGQGTLVTVSSGGGGSGGGGSGGGGSQTVVTQEPSLTVSPGGTVTITCGSSTGAVTSGNYPNWIQKKPGQAPRGLIGGTKFLAPGTPARFSGSLEGGKAALTLSGVQPEDEAEYYCVLYYSNRWVFGSGTKLTVL

SEQ ID NO: 302 - protein, 1496 aa, Synthetic construct
QVQLQESGPGLVKPSETLSLTCTVSGGSISSSSYFWGWIRQPPGKCLEWIGNIYYSGSSNYNPSLKSRVTISVDTSKNQFSLKLSSVTAADTAVYYCARLPRGDRDAFDIWGQGTMVTVSSGGGGSGGGGSGGGGSDIVMTQSPSSLSASVGDRVTITCRASQGISNYLAWYQQKPGKVPKLLIYAASTLQSGVPSRFSGSGSGTDFTLTISSLQPEDFATYYCQQSYSTPFTFGCGTKVEIKSGGGGSEVQLVESGGGLVQPGGSLKLSCAASGFTFNKYAMNWVRQAPGKGMEWVARIRSKYNNYATYYADAVKDRFTISRDDSKNTLYLQMNNLKTEDTAVYYCVRAGNFGSSYISYFAYWGQGTLVTVSSGGGGSGGGGSGGGGSQTVVTQEPSLTVSPGGTVTITCGSSTGAVTSGNYPNWIQKKPGQAPRGLIGGTKFLAPGTPARFSGSLEGGKAALTLSGVQPEDEAEYYCVLYYSNRWVFGSGTKLTVLGGGGDKTHTCPPCPAPELLGGPSVFLFPPKPKDTLMISRTPEVTCVVVDVSHEDPEVKFNWYVDGVEVHNAKTKPCEEQYGSTYRCVSVLTVLHQDWLNGKEYKCKVSNKALPAPIEKTISKAKGQPREPQVYTLPPSREEMTKNQVSLTCLVKGFYPSDIAVEWESNGQPENNYKTTPPVLDSDGSFFLYSKLTVDKSRWQQGNVFSCSVMHEALHNHYTQKSLSLSPGKGGGGSGGGGSGGGGSGGGGSGGGGSGGGGSDKTHTCPPCPAPELLGGPSVFLFPPKPKDTLMISRTPEVTCVVVDVSHEDPEVKFNWYVDGVEVHNAKTKPCEEQYGSTYRCVSVLTVLHQDWLNGKEYKCKVSNKALPAPIEKTISKAKGQPREPQVYTLPPSREEMTKNQVSLTCLVKGFYPSDIAVEWESNGQPENNYKTTPPVLDSDGSFFLYSKLTVDKSRWQQGNVFSCSVMHEALHNHYTQKSLSLSPGKGGGGEVQLLESGGGLVQPGGSLRLSCAASGFSFSSYPINWVRQAPGKCLEWVGVIWTGGGTNYASSVKGRFTISRDNSKNTVYLQMNSLRAEDTAVYYCAKSRGVYDFKGRGAMDYWGQGTLVTVSSGGGGSGGGGSGGGGSDIVMTQSPDSLAVSLGERATINCKSSQSLLYSSNQKNYFAWYQQKPGQPPKLLIYWASTRESGVPDRFSGSGSGTDFTLTISSLQAEDVAVYYCQQYYSYPYTFGCGTKLEIKSGGGGSEVQLVESGGGLVQPGGSLKLSCAASGFTFNKYAMNWVRQAPGKGMEWVARIRSKYNNYATYYADAVKDRFTISRDDSKNTLYLQMNNLKTEDTAVYYCVRAGNFGSSYISYFAYWGQGTLVTVSSGGGGSGGGGSGGGGSQTVVTQEPSLTVSPGGTVTITCGSSTGAVTSGNYPNWIQKKPGQAPRGLIGGTKFLAPGTPARFSGSLEGGKAALTLSGVQPEDEAEYYCVLYYSNRWVFGSGTKLTVL

SEQ ID NO: 303 - protein, 1488 aa, Synthetic construct
QVQLQESGPGLVKPSETLSLTCTVSGGSISSSSYFWGWIRQPPGKCLEWIGNIYYSGSSNYNPSLKSRVTISVDTSKNQFSLKLSSVTAADTAVYYCARLPRGDRDAFDIWGQGTMVTVSSGGGGSGGGGSGGGGSDIVMTQSPSSLSASVGDRVTITCRASQGISNYLAWYQQKPGKVPKLLIYAASTLQSGVPSRFSGSGSGTDFTLTISSLQPEDFATYYCQQSYSTPFTFGCGTKVEIKSGGGGSEVQLVESGGGLVQPGGSLKLSCAASGFTFNKYAMNWVRQAPGKGMEWVARIRSKYNNYATYYADAVKDRFTISRDDSKNTLYLQMNNLKTEDTAVYYCVRAGNFGSSYISYFAYWGQGTLVTVSSGGGGSGGGGSGGGGSQTVVTQEPSLTVSPGGTVTITCGSSTGAVTSGNYPNWIQKKPGQAPRGLIGGTKFLAPGTPARFSGSLEGGKAALTLSGVQPEDEAEYYCVLYYSNRWVFGSGTKLTVLGGGGDKTHTCPPCPAPELLGGPSVFLFPPKPKDTLMISRTPEVTCVVVDVSHEDPEVKFNWYVDGVEVHNAKTKPCEEQYGSTYRCVSVLTVLHQDWLNGKEYKCKVSNKALPAPIEKTISKAKGQPREPQVYTLPPSREEMTKNQVSLTCLVKGFYPSDIAVEWESNGQPENNYKTTPPVLDSDGSFFLYSKLTVDKSRWQQGNVFSCSVMHEALHNHYTQKSLSLSPGKGGGGSGGGGSGGGGSGGGGSGGGGSGGGGSDKTHTCPPCPAPELLGGPSVFLFPPKPKDTLMISRTPEVTCVVVDVSHEDPEVKFNWYVDGVEVHNAKTKPCEEQYGSTYRCVSVLTVLHQDWLNGKEYKCKVSNKALPAPIEKTISKAKGQPREPQVYTLPPSREEMTKNQVSLTCLVKGFYPSDIAVEWESNGQPENNYKTTPPVLDSDGSFFLYSKLTVDKSRWQQGNVFSCSVMHEALHNHYTQKSLSLSPGKGGGGQVQLVQSGAEVVKPGASVKVSCKASGYTFTSSWMNWVRQAPGQCLEWMGRIYTGTGETKYSGKFQGRVTITRDTSASTAYMELSSLTSEDTAVYYCARQRDYGALYAMDYWGQGTLVTVSSGGGGSGGGGSGGGGSDIQLTQSPSFLSASVGDRVTITCRASDDIYSYLAWYQQKPGKAPKLLVYNAKTLAEGVPSRFSGSGSGTEFTLTISSLQPEDFATYYCQNHDRTPFTFGCGTKVDIKSGGGGSEVQLVESGGGLVQPGGSLKLSCAASGFTFNKYAMNWVRQAPGKGMEWVARIRSKYNNYATYYADAVKDRFTISRDDSKNTLYLQMNNLKTEDTAVYYCVRAGNFGSSYISYFAYWGQGTLVTVSSGGGGSGGGGSGGGGSQTVVTQEPSLTVSPGGTVTITCGSSTGAVTSGNYPNWIQKKPGQAPRGLIGGTKFLAPGTPARFSGSLEGGKAALTLSGVQPEDEAEYYCVLYYSNRWVFGSGTKLTVL

SEQ ID NO: 304 - protein, 1484 aa, Synthetic construct
QVQLQESGPGLVKPSETLSLTCTVSGGSISSSSYFWGWIRQPPGKCLEWIGNIYYSGSSNYNPSLKSRVTISVDTSKNQFSLKLSSVTAADTAVYYCARLPRGDRDAFDIWGQGTMVTVSSGGGGSGGGGSGGGGSDIVMTQSPSSLSASVGDRVTITCRASQGISNYLAWYQQKPGKVPKLLIYAASTLQSGVPSRFSGSGSGTDFTLTISSLQPEDFATYYCQQSYSTPFTFGCGTKVEIKSGGGGSEVQLVESGGGLVQPGGSLKLSCAASGFTFNKYAMNWVRQAPGKGMEWVARIRSKYNNYATYYADAVKDRFTISRDDSKNTLYLQMNNLKTEDTAVYYCVRAGNFGSSYISYFAYWGQGTLVTVSSGGGGSGGGGSGGGGSQTVVTQEPSLTVSPGGTVTITCGSSTGAVTSGNYPNWIQKKPGQAPRGLIGGTKFLAPGTPARFSGSLEGGKAALTLSGVQPEDEAEYYCVLYYSNRWVFGSGTKLTVLGGGGDKTHTCPPCPAPELLGGPSVFLFPPKPKDTLMISRTPEVTCVVVDVSHEDPEVKFNWYVDGVEVHNAKTKPCEEQYGSTYRCVSVLTVLHQDWLNGKEYKCKVSNKALPAPIEKTISKAKGQPREPQVYTLPPSREEMTKNQVSLTCLVKGFYPSDIAVEWESNGQPENNYKTTPPVLDSDGSFFLYSKLTVDKSRWQQGNVFSCSVMHEALHNHYTQKSLSLSPGKGGGGSGGGGSGGGGSGGGGSGGGGSGGGGSDKTHTCPPCPAPELLGGPSVFLFPPKPKDTLMISRTPEVTCVVVDVSHEDPEVKFNWYVDGVEVHNAKTKPCEEQYGSTYRCVSVLTVLHQDWLNGKEYKCKVSNKALPAPIEKTISKAKGQPREPQVYTLPPSREEMTKNQVSLTCLVKGFYPSDIAVEWESNGQPENNYKTTPPVLDSDGSFFLYSKLTVDKSRWQQGNVFSCSVMHEALHNHYTQKSLSLSPGKGGGGQVQLVQSGAEVKKPGASVKVSCKASGYTFTNYWMNWVRQAPGQCLEWMGNIHSKAHGTNYNQKFQGRVTMTVDTSSSTAYMELSRLRSDDTAVYYCATRYFYVMDYWGQGTLVTVSSGGGGSGGGGSGGGGSDIQMTQSPSSLSASVGDRVTITCRASQDISNYLNWYQQKPGKVPKLLIYYTSRLHSGVPSRFSGSGSGTDFTLTISSLQPEDVATYYCVQYAQFPLTFGCGTKVEIKSGGGGSEVQLVESGGGLVQPGGSLKLSCAASGFTFNKYAMNWVRQAPGKGMEWVARIRSKYNNYATYYADAVKDRFTISRDDSKNTLYLQMNNLKTEDTAVYYCVRAGNFGSSYISYFAYWGQGTLVTVSSGGGGSGGGGSGGGGSQTVVTQEPSLTVSPGGTVTITCGSSTGAVTSGNYPNWIQKKPGQAPRGLIGGTKFLAPGTPARFSGSLEGGKAALTLSGVQPEDEAEYYCVLYYSNRWVFGSGTKLTVL

SEQ ID NO: 305 - protein, 1510 aa, Synthetic construct
QVQLQESGPGLVKPSETLSLTCTVSGGSISSSSYFWGWIRQPPGKCLEWIGNIYYSGSSNYNPSLKSRVTISVDTSKNQFSLKLSSVTAADTAVYYCARLPRGDRDAFDIWGQGTMVTVSSGGGGSGGGGSGGGGSDIVMTQSPSSLSASVGDRVTITCRASQGISNYLAWYQQKPGKVPKLLIYAASTLQSGVPSRFSGSGSGTDFTLTISSLQPEDFATYYCQQSYSTPFTFGCGTKVEIKSGGGGSEVQLVESGGGLVQPGGSLKLSCAASGFTFNKYAMNWVRQAPGKGMEWVARIRSKYNNYATYYADAVKDRFTISRDDSKNTLYLQMNNLKTEDTAVYYCVRAGNFGSSYISYFAYWGQGTLVTVSSGGGGSGGGGSGGGGSQTVVTQEPSLTVSPGGTVTITCGSSTGAVTSGNYPNWIQKKPGQAPRGLIGGTKFLAPGTPARFSGSLEGGKAALTLSGVQPEDEAEYYCVLYYSNRWVFGSGTKLTVLGGGGSGGGGSGGGGSDKTHTCPPCPAPELLGGPSVFLFPPKPKDTLMISRTPEVTCVVVDVSHEDPEVKFNWYVDGVEVHNAKTKPCEEQYGSTYRCVSVLTVLHQDWLNGKEYKCKVSNKALPAPIEKTISKAKGQPREPQVYTLPPSREEMTKNQVSLTCLVKGFYPSDIAVEWESNGQPENNYKTTPPVLDSDGSFFLYSKLTVDKSRWQQGNVFSCSVMHEALHNHYTQKSLSLSPGKGGGGSGGGGSGGGGSGGGGSGGGGSGGGGSDKTHTCPPCPAPELLGGPSVFLFPPKPKDTLMISRTPEVTCVVVDVSHEDPEVKFNWYVDGVEVHNAKTKPCEEQYGSTYRCVSVLTVLHQDWLNGKEYKCKVSNKALPAPIEKTISKAKGQPREPQVYTLPPSREEMTKNQVSLTCLVKGFYPSDIAVEWESNGQPENNYKTTPPVLDSDGSFFLYSKLTVDKSRWQQGNVFSCSVMHEALHNHYTQKSLSLSPGKGGGGSGGGGSGGGGSQVQLVQSGAEVVKPGASVKVSCKASGYTFTSSWMNWVRQAPGQCLEWMGRIYTGTGETKYSGKFQGRVTITRDTSASTAYMELSSLTSEDTAVYYCARQRDYGALYAMDYWGQGTLVTVSSGGGGSGGGGSGGGGSDIQLTQSPSFLSASVGDRVTITCRASDDIYSYLAWYQQKPGKAPKLLVYNAKTLAEGVPSRFSGSGSGTEFTLTISSLQPEDFATYYCQNHDRTPFTFGCGTKVDIKSGGGGSEVQLVESGGGLVQPGGSLKLSCAASGFTFNKYAMNWVRQAPGKGMEWVARIRSKYNNYATYYADAVKDRFTISRDDSKNTLYLQMNNLKTEDTAVYYCVRAGNFGSSYISYFAYWGQGTLVTVSSGGGGSGGGGSGGGGSQTVVTQEPSLTVSPGGTVTITCGSSTGAVTSGNYPNWIQKKPGQAPRGLIGGTKFLAPGTPARFSGSLEGGKAALTLSGVQPEDEAEYYCVLYYSNRWVFGSGTKLTVL

SEQ ID NO: 306 - protein, 1484 aa, Synthetic construct
QVQLQESGPGLVKPSETLSLTCTVSGGSISSSSYFWGWIRQPPGKCLEWIGNIYYSGSSNYNPSLKSRVTISVDTSKNQFSLKLSSVTAADTAVYYCARLPRGDRDAFDIWGQGTMVTVSSGGGGSGGGGSGGGGSDIVMTQSPSSLSASVGDRVTITCRASQGISNYLAWYQQKPGKVPKLLIYAASTLQSGVPSRFSGSGSGTDFTLTISSLQPEDFATYYCQQSYSTPFTFGCGTKVEIKSGGGGSEVQLVESGGGLVQPGGSLKLSCAASGFTFNKYAMNWVRQAPGKGMEWVARIRSKYNNYATYYADAVKDRFTISRDDSKNTLYLQMNNLKTEDTAVYYCVRAGNFGSSYISYFAYWGQGTLVTVSSGGGGSGGGGSGGGGSQTVVTQEPSLTVSPGGTVTITCGSSTGAVTSGNYPNWIQKKPGQAPRGLIGGTKFLAPGTPARFSGSLEGGKAALTLSGVQPEDEAEYYCVLYYSNRWVFGSGTKLTVLGGGGDKTHTCPPCPAPELLGGPSVFLFPPKPKDTLMISRTPEVTCVVVDVSHEDPEVKFNWYVDGVEVHNAKTKPCEEQYGSTYRCVSVLTVLHQDWLNGKEYKCKVSNKALPAPIEKTISKAKGQPREPQVYTLPPSREEMTKNQVSLTCLVKGFYPSDIAVEWESNGQPENNYKTTPPVLDSDGSFFLYSKLTVDKSRWQQGNVFSCSVMHEALHNHYTQKSLSLSPGKGGGGSGGGGSGGGGSGGGGSGGGGSGGGGSDKTHTCPPCPAPELLGGPSVFLFPPKPKDTLMISRTPEVTCVVVDVSHEDPEVKFNWYVDGVEVHNAKTKPCEEQYGSTYRCVSVLTVLHQDWLNGKEYKCKVSNKALPAPIEKTISKAKGQPREPQVYTLPPSREEMTKNQVSLTCLVKGFYPSDIAVEWESNGQPENNYKTTPPVLDSDGSFFLYSKLTVDKSRWQQGNVFSCSVMHEALHNHYTQKSLSLSPGKGGGGQVQLVQSGAEVKKPGASVKVSCKASGYTFTSYWMHWVRQAPGQCLEWMGVIRTSTSYTIYNQKFKGRVTMTRDTSTSTVYMELSSLRSEDTAVYYCARSGPGYFDVWGQGTMVTVSSGGGGSGGGGSGGGGSDIQLTQSPSFLSASVGDRVTITCRASENIYSYLAWYQQKPGKAPKLLIYNAKTLAEGVPSRFSGSGSGTEFTLTISSLQPEDFATYYCQHNYGTPYTFGCGTKLEIKSGGGGSEVQLVESGGGLVQPGGSLKLSCAASGFTFNKYAMNWVRQAPGKGMEWVARIRSKYNNYATYYADAVKDRFTISRDDSKNTLYLQMNNLKTEDTAVYYCVRAGNFGSSYISYFAYWGQGTLVTVSSGGGGSGGGGSGGGGSQTVVTQEPSLTVSPGGTVTITCGSSTGAVTSGNYPNWIQKKPGQAPRGLIGGTKFLAPGTPARFSGSLEGGKAALTLSGVQPEDEAEYYCVLYYSNRWVFGSGTKLTVL

SEQ ID NO: 307 - protein, 1488 aa, Synthetic construct
QVQLQESGPGLVKPSETLSLTCTVSGGSISSSSYFWGWIRQPPGKCLEWIGNIYYSGSSNYNPSLKSRVTISVDTSKNQFSLKLSSVTAADTAVYYCARLPRGDRDAFDIWGQGTMVTVSSGGGGSGGGGSGGGGSDIVMTQSPSSLSASVGDRVTITCRASQGISNYLAWYQQKPGKVPKLLIYAASTLQSGVPSRFSGSGSGTDFTLTISSLQPEDFATYYCQQSYSTPFTFGCGTKVEIKSGGGGSEVQLVESGGGLVQPGGSLKLSCAASGFTFNKYAINWVREAPGKGLEWVARIRSKYNNYATYYADAVKDRFTISRDDSKNTAYLQMNNLKTEDTAVYYCVRNANFGTSYISYFAYWGQGTLVTVSSGGGGSGGGGSGGGGSQTVVTQEPSLTVSPGGTVTLTCGSSTGAVTSGNYPNWVQKKPGQAPRGLIGGTKFLAPGTPARFSGSLLGGKAALTLSGVQPEDEAEYYCVLWYSNRWVFGSGTKLTVLGGGGDKTHTCPPCPAPELLGGPSVFLFPPKPKDTLMISRTPEVTCVVVDVSHEDPEVKFNWYVDGVEVHNAKTKPCEEQYGSTYRCVSVLTVLHQDWLNGKEYKCKVSNKALPAPIEKTISKAKGQPREPQVYTLPPSREEMTKNQVSLTCLVKGFYPSDIAVEWESNGQPENNYKTTPPVLDSDGSFFLYSKLTVDKSRWQQGNVFSCSVMHEALHNHYTQKSLSLSPGKGGGGSGGGGSGGGGSGGGGSGGGGSGGGGSDKTHTCPPCPAPELLGGPSVFLFPPKPKDTLMISRTPEVTCVVVDVSHEDPEVKFNWYVDGVEVHNAKTKPCEEQYGSTYRCVSVLTVLHQDWLNGKEYKCKVSNKALPAPIEKTISKAKGQPREPQVYTLPPSREEMTKNQVSLTCLVKGFYPSDIAVEWESNGQPENNYKTTPPVLDSDGSFFLYSKLTVDKSRWQQGNVFSCSVMHEALHNHYTQKSLSLSPGKGGGGQVQLVQSGAEVVKPGASVKVSCKASGYTFTSSWMNWVRQAPGQCLEWMGRIYTGTGETKYSGKFQGRVTITRDTSASTAYMELSSLTSEDTAVYYCARQRDYGALYAMDYWGQGTLVTVSSGGGGSGGGGSGGGGSDIQLTQSPSFLSASVGDRVTITCRASDDIYSYLAWYQQKPGKAPKLLVYNAKTLAEGVPSRFSGSGSGTEFTLTISSLQPEDFATYYCQNHDRTPFTFGCGTKVDIKSGGGGSEVQLVESGGGLVQPGGSLKLSCAASGFTFNKYAINWVREAPGKGLEWVARIRSKYNNYATYYADAVKDRFTISRDDSKNTAYLQMNNLKTEDTAVYYCVRNANFGTSYISYFAYWGQGTLVTVSSGGGGSGGGGSGGGGSQTVVTQEPSLTVSPGGTVTLTCGSSTGAVTSGNYPNWVQKKPGQAPRGLIGGTKFLAPGTPARFSGSLLGGKAALTLSGVQPEDEAEYYCVLWYSNRWVFGSGTKLTVL

SEQ ID NO: 308 - protein, 1484 aa, Synthetic construct
QVQLQESGPGLVKPSETLSLTCTVSGGSISSSSYFWGWIRQPPGKCLEWIGNIYYSGSSNYNPSLKSRVTISVDTSKNQFSLKLSSVTAADTAVYYCARLPRGDRDAFDIWGQGTMVTVSSGGGGSGGGGSGGGGSDIVMTQSPSSLSASVGDRVTITCRASQGISNYLAWYQQKPGKVPKLLIYAASTLQSGVPSRFSGSGSGTDFTLTISSLQPEDFATYYCQQSYSTPFTFGCGTKVEIKSGGGGSEVQLVESGGGLVQPGGSLKLSCAASGFTFNKYAINWVREAPGKGLEWVARIRSKYNNYATYYADAVKDRFTISRDDSKNTAYLQMNNLKTEDTAVYYCVRNANFGTSYISYFAYWGQGTLVTVSSGGGGSGGGGSGGGGSQTVVTQEPSLTVSPGGTVTLTCGSSTGAVTSGNYPNWVQKKPGQAPRGLIGGTKFLAPGTPARFSGSLLGGKAALTLSGVQPEDEAEYYCVLWYSNRWVFGSGTKLTVLGGGGDKTHTCPPCPAPELLGGPSVFLFPPKPKDTLMISRTPEVTCVVVDVSHEDPEVKFNWYVDGVEVHNAKTKPCEEQYGSTYRCVSVLTVLHQDWLNGKEYKCKVSNKALPAPIEKTISKAKGQPREPQVYTLPPSREEMTKNQVSLTCLVKGFYPSDIAVEWESNGQPENNYKTTPPVLDSDGSFFLYSKLTVDKSRWQQGNVFSCSVMHEALHNHYTQKSLSLSPGKGGGGSGGGGSGGGGSGGGGSGGGGSGGGGSDKTHTCPPCPAPELLGGPSVFLFPPKPKDTLMISRTPEVTCVVVDVSHEDPEVKFNWYVDGVEVHNAKTKPCEEQYGSTYRCVSVLTVLHQDWLNGKEYKCKVSNKALPAPIEKTISKAKGQPREPQVYTLPPSREEMTKNQVSLTCLVKGFYPSDIAVEWESNGQPENNYKTTPPVLDSDGSFFLYSKLTVDKSRWQQGNVFSCSVMHEALHNHYTQKSLSLSPGKGGGGQVQLVQSGAEVKKPGASVKVSCKASGYTFTNYWMNWVRQAPGQCLEWMGNIHSKAHGTNYNQKFQGRVTMTVDTSSSTAYMELSRLRSDDTAVYYCATRYFYVMDYWGQGTLVTVSSGGGGSGGGGSGGGGSDIQMTQSPSSLSASVGDRVTITCRASQDISNYLNWYQQKPGKVPKLLIYYTSRLHSGVPSRFSGSGSGTDFTLTISSLQPEDVATYYCVQYAQFPLTFGCGTKVEIKSGGGGSEVQLVESGGGLVQPGGSLKLSCAASGFTFNKYAINWVREAPGKGLEWVARIRSKYNNYATYYADAVKDRFTISRDDSKNTAYLQMNNLKTEDTAVYYCVRNANFGTSYISYFAYWGQGTLVTVSSGGGGSGGGGSGGGGSQTVVTQEPSLTVSPGGTVTLTCGSSTGAVTSGNYPNWVQKKPGQAPRGLIGGTKFLAPGTPARFSGSLLGGKAALTLSGVQPEDEAEYYCVLWYSNRWVFGSGTKLTVL

SEQ ID NO: 309 - protein, 1496 aa, Synthetic construct
QVQLQESGPGLVKPSETLSLTCTVSGGSISSSSYFWGWIRQPPGKCLEWIGNIYYSGSSNYNPSLKSRVTISVDTSKNQFSLKLSSVTAADTAVYYCARLPRGDRDAFDIWGQGTMVTVSSGGGGSGGGGSGGGGSDIVMTQSPSSLSASVGDRVTITCRASQGISNYLAWYQQKPGKVPKLLIYAASTLQSGVPSRFSGSGSGTDFTLTISSLQPEDFATYYCQQSYSTPFTFGCGTKVEIKSGGGGSEVQLVESGGGLVQPGGSLKLSCAASGFTFNKYAINWVREAPGKGLEWVARIRSKYNNYATYYADAVKDRFTISRDDSKNTAYLQMNNLKTEDTAVYYCVRNANFGTSYISYFAYWGQGTLVTVSSGGGGSGGGGSGGGGSQTVVTQEPSLTVSPGGTVTLTCGSSTGAVTSGNYPNWVQKKPGQAPRGLIGGTKFLAPGTPARFSGSLLGGKAALTLSGVQPEDEAEYYCVLWYSNRWVFGSGTKLTVLGGGGDKTHTCPPCPAPELLGGPSVFLFPPKPKDTLMISRTPEVTCVVVDVSHEDPEVKFNWYVDGVEVHNAKTKPCEEQYGSTYRCVSVLTVLHQDWLNGKEYKCKVSNKALPAPIEKTISKAKGQPREPQVYTLPPSREEMTKNQVSLTCLVKGFYPSDIAVEWESNGQPENNYKTTPPVLDSDGSFFLYSKLTVDKSRWQQGNVFSCSVMHEALHNHYTQKSLSLSPGKGGGGSGGGGSGGGGSGGGGSGGGGSGGGGSDKTHTCPPCPAPELLGGPSVFLFPPKPKDTLMISRTPEVTCVVVDVSHEDPEVKFNWYVDGVEVHNAKTKPCEEQYGSTYRCVSVLTVLHQDWLNGKEYKCKVSNKALPAPIEKTISKAKGQPREPQVYTLPPSREEMTKNQVSLTCLVKGFYPSDIAVEWESNGQPENNYKTTPPVLDSDGSFFLYSKLTVDKSRWQQGNVFSCSVMHEALHNHYTQKSLSLSPGKGGGGEVQLLESGGGLVQPGGSLRLSCAASGFSFSSYPINWVRQAPGKCLEWVGVIWTGGGTNYASSVKGRFTISRDNSKNTVYLQMNSLRAEDTAVYYCAKSRGVYDFKGRGAMDYWGQGTLVTVSSGGGGSGGGGSGGGGSDIVMTQSPDSLAVSLGERATINCKSSQSLLYSSNQKNYFAWYQQKPGQPPKLLIYWASTRESGVPDRFSGSGSGTDFTLTISSLQAEDVAVYYCQQYYSYPYTFGCGTKLEIKSGGGGSEVQLVESGGGLVQPGGSLKLSCAASGFTFNKYAINWVREAPGKGLEWVARIRSKYNNYATYYADAVKDRFTISRDDSKNTAYLQMNNLKTEDTAVYYCVRNANFGTSYISYFAYWGQGTLVTVSSGGGGSGGGGSGGGGSQTVVTQEPSLTVSPGGTVTLTCGSSTGAVTSGNYPNWVQKKPGQAPRGLIGGTKFLAPGTPARFSGSLLGGKAALTLSGVQPEDEAEYYCVLWYSNRWVFGSGTKLTVL

SEQ ID NO: 310 - protein, 1484 aa, Synthetic construct
QVQLQESGPGLVKPSETLSLTCTVSGGSISSSSYFWGWIRQPPGKCLEWIGNIYYSGSSNYNPSLKSRVTISVDTSKNQFSLKLSSVTAADTAVYYCARLPRGDRDAFDIWGQGTMVTVSSGGGGSGGGGSGGGGSDIVMTQSPSSLSASVGDRVTITCRASQGISNYLAWYQQKPGKVPKLLIYAASTLQSGVPSRFSGSGSGTDFTLTISSLQPEDFATYYCQQSYSTPFTFGCGTKVEIKSGGGGSEVQLVESGGGLVQPGGSLKLSCAASGFTFNKYAINWVREAPGKGLEWVARIRSKYNNYATYYADAVKDRFTISRDDSKNTAYLQMNNLKTEDTAVYYCVRNANFGTSYISYFAYWGQGTLVTVSSGGGGSGGGGSGGGGSQTVVTQEPSLTVSPGGTVTLTCGSSTGAVTSGNYPNWVQKKPGQAPRGLIGGTKFLAPGTPARFSGSLLGGKAALTLSGVQPEDEAEYYCVLWYSNRWVFGSGTKLTVLGGGGDKTHTCPPCPAPELLGGPSVFLFPPKPKDTLMISRTPEVTCVVVDVSHEDPEVKFNWYVDGVEVHNAKTKPCEEQYGSTYRCVSVLTVLHQDWLNGKEYKCKVSNKALPAPIEKTISKAKGQPREPQVYTLPPSREEMTKNQVSLTCLVKGFYPSDIAVEWESNGQPENNYKTTPPVLDSDGSFFLYSKLTVDKSRWQQGNVFSCSVMHEALHNHYTQKSLSLSPGKGGGGSGGGGSGGGGSGGGGSGGGGSGGGGSDKTHTCPPCPAPELLGGPSVFLFPPKPKDTLMISRTPEVTCVVVDVSHEDPEVKFNWYVDGVEVHNAKTKPCEEQYGSTYRCVSVLTVLHQDWLNGKEYKCKVSNKALPAPIEKTISKAKGQPREPQVYTLPPSREEMTKNQVSLTCLVKGFYPSDIAVEWESNGQPENNYKTTPPVLDSDGSFFLYSKLTVDKSRWQQGNVFSCSVMHEALHNHYTQKSLSLSPGKGGGGQVQLVQSGAEVKKPGASVKVSCKASGYTFTSYWMHWVRQAPGQCLEWMGVIRTSTSYTIYNQKFKGRVTMTRDTSTSTVYMELSSLRSEDTAVYYCARSGPGYFDVWGQGTMVTVSSGGGGSGGGGSGGGGSDIQLTQSPSFLSASVGDRVTITCRASENIYSYLAWYQQKPGKAPKLLIYNAKTLAEGVPSRFSGSGSGTEFTLTISSLQPEDFATYYCQHNYGTPYTFGCGTKLEIKSGGGGSEVQLVESGGGLVQPGGSLKLSCAASGFTFNKYAINWVREAPGKGLEWVARIRSKYNNYATYYADAVKDRFTISRDDSKNTAYLQMNNLKTEDTAVYYCVRNANFGTSYISYFAYWGQGTLVTVSSGGGGSGGGGSGGGGSQTVVTQEPSLTVSPGGTVTLTCGSSTGAVTSGNYPNWVQKKPGQAPRGLIGGTKFLAPGTPARFSGSLLGGKAALTLSGVQPEDEAEYYCVLWYSNRWVFGSGTKLTVL

SEQ ID NO: 311 - protein, 1510 aa, Synthetic construct
QVQLQESGPGLVKPSETLSLTCTVSGGSISSSSYFWGWIRQPPGKCLEWIGNIYYSGSSNYNPSLKSRVTISVDTSKNQFSLKLSSVTAADTAVYYCARLPRGDRDAFDIWGQGTMVTVSSGGGGSGGGGSGGGGSDIVMTQSPSSLSASVGDRVTITCRASQGISNYLAWYQQKPGKVPKLLIYAASTLQSGVPSRFSGSGSGTDFTLTISSLQPEDFATYYCQQSYSTPFTFGCGTKVEIKSGGGGSEVQLVESGGGLVQPGGSLKLSCAASGFTFNKYAINWVREAPGKGLEWVARIRSKYNNYATYYADAVKDRFTISRDDSKNTAYLQMNNLKTEDTAVYYCVRNANFGTSYISYFAYWGQGTLVTVSSGGGGSGGGGSGGGGSQTVVTQEPSLTVSPGGTVTLTCGSSTGAVTSGNYPNWVQKKPGQAPRGLIGGTKFLAPGTPARFSGSLLGGKAALTLSGVQPEDEAEYYCVLWYSNRWVFGSGTKLTVLGGGGSGGGGSGGGGSDKTHTCPPCPAPELLGGPSVFLFPPKPKDTLMISRTPEVTCVVVDVSHEDPEVKFNWYVDGVEVHNAKTKPCEEQYGSTYRCVSVLTVLHQDWLNGKEYKCKVSNKALPAPIEKTISKAKGQPREPQVYTLPPSREEMTKNQVSLTCLVKGFYPSDIAVEWESNGQPENNYKTTPPVLDSDGSFFLYSKLTVDKSRWQQGNVFSCSVMHEALHNHYTQKSLSLSPGKGGGGSGGGGSGGGGSGGGGSGGGGSGGGGSDKTHTCPPCPAPELLGGPSVFLFPPKPKDTLMISRTPEVTCVVVDVSHEDPEVKFNWYVDGVEVHNAKTKPCEEQYGSTYRCVSVLTVLHQDWLNGKEYKCKVSNKALPAPIEKTISKAKGQPREPQVYTLPPSREEMTKNQVSLTCLVKGFYPSDIAVEWESNGQPENNYKTTPPVLDSDGSFFLYSKLTVDKSRWQQGNVFSCSVMHEALHNHYTQKSLSLSPGKGGGGSGGGGSGGGGSQVQLVQSGAEVVKPGASVKVSCKASGYTFTSSWMNWVRQAPGQCLEWMGRIYTGTGETKYSGKFQGRVTITRDTSASTAYMELSSLTSEDTAVYYCARQRDYGALYAMDYWGQGTLVTVSSGGGGSGGGGSGGGGSDIQLTQSPSFLSASVGDRVTITCRASDDIYSYLAWYQQKPGKAPKLLVYNAKTLAEGVPSRFSGSGSGTEFTLTISSLQPEDFATYYCQNHDRTPFTFGCGTKVDIKSGGGGSEVQLVESGGGLVQPGGSLKLSCAASGFTFNKYAINWVREAPGKGLEWVARIRSKYNNYATYYADAVKDRFTISRDDSKNTAYLQMNNLKTEDTAVYYCVRNANFGTSYISYFAYWGQGTLVTVSSGGGGSGGGGSGGGGSQTVVTQEPSLTVSPGGTVTLTCGSSTGAVTSGNYPNWVQKKPGQAPRGLIGGTKFLAPGTPARFSGSLLGGKAALTLSGVQPEDEAEYYCVLWYSNRWVFGSGTKLTVL

SEQ ID NO: 312 - protein, 1518 aa, Synthetic construct
QVQLQESGPGLVKPSETLSLTCTVSGGSISSSSYFWGWIRQPPGKCLEWIGNIYYSGSSNYNPSLKSRVTISVDTSKNQFSLKLSSVTAADTAVYYCARLPRGDRDAFDIWGQGTMVTVSSGGGGSGGGGSGGGGSDIVMTQSPSSLSASVGDRVTITCRASQGISNYLAWYQQKPGKVPKLLIYAASTLQSGVPSRFSGSGSGTDFTLTISSLQPEDFATYYCQQSYSTPFTFGCGTKVEIKSGGGGSEVQLVESGGGLVQPGGSLKLSCAASGFTFNKYAINWVREAPGKGLEWVARIRSKYNNYATYYADAVKDRFTISRDDSKNTAYLQMNNLKTEDTAVYYCVRNANFGTSYISYFAYWGQGTLVTVSSGGGGSGGGGSGGGGSQTVVTQEPSLTVSPGGTVTLTCGSSTGAVTSGNYPNWVQKKPGQAPRGLIGGTKFLAPGTPARFSGSLLGGKAALTLSGVQPEDEAEYYCVLWYSNRWVFGSGTKLTVLGGGGSGGGGSGGGGSDKTHTCPPCPAPELLGGPSVFLFPPKPKDTLMISRTPEVTCVVVDVSHEDPEVKFNWYVDGVEVHNAKTKPCEEQYGSTYRCVSVLTVLHQDWLNGKEYKCKVSNKALPAPIEKTISKAKGQPREPQVYTLPPSREEMTKNQVSLTCLVKGFYPSDIAVEWESNGQPENNYKTTPPVLDSDGSFFLYSKLTVDKSRWQQGNVFSCSVMHEALHNHYTQKSLSLSPGKGGGGSGGGGSGGGGSGGGGSGGGGSGGGGSDKTHTCPPCPAPELLGGPSVFLFPPKPKDTLMISRTPEVTCVVVDVSHEDPEVKFNWYVDGVEVHNAKTKPCEEQYGSTYRCVSVLTVLHQDWLNGKEYKCKVSNKALPAPIEKTISKAKGQPREPQVYTLPPSREEMTKNQVSLTCLVKGFYPSDIAVEWESNGQPENNYKTTPPVLDSDGSFFLYSKLTVDKSRWQQGNVFSCSVMHEALHNHYTQKSLSLSPGKGGGGSGGGGSGGGGSEVQLLESGGGLVQPGGSLRLSCAASGFSFSSYPINWVRQAPGKCLEWVGVIWTGGGTNYASSVKGRFTISRDNSKNTVYLQMNSLRAEDTAVYYCAKSRGVYDFKGRGAMDYWGQGTLVTVSSGGGGSGGGGSGGGGSDIVMTQSPDSLAVSLGERATINCKSSQSLLYSSNQKNYFAWYQQKPGQPPKLLIYWASTRESGVPDRFSGSGSGTDFTLTISSLQAEDVAVYYCQQYYSYPYTFGCGTKLEIKSGGGGSEVQLVESGGGLVQPGGSLKLSCAASGFTFNKYAINWVREAPGKGLEWVARIRSKYNNYATYYADAVKDRFTISRDDSKNTAYLQMNNLKTEDTAVYYCVRNANFGTSYISYFAYWGQGTLVTVSSGGGGSGGGGSGGGGSQTVVTQEPSLTVSPGGTVTLTCGSSTGAVTSGNYPNWVQKKPGQAPRGLIGGTKFLAPGTPARFSGSLLGGKAALTLSGVQPEDEAEYYCVLWYSNRWVFGSGTKLTVL

SEQ ID NO: 313 - protein, 1506 aa, Synthetic construct
QVQLQESGPGLVKPSETLSLTCTVSGGSISSSSYFWGWIRQPPGKCLEWIGNIYYSGSSNYNPSLKSRVTISVDTSKNQFSLKLSSVTAADTAVYYCARLPRGDRDAFDIWGQGTMVTVSSGGGGSGGGGSGGGGSDIVMTQSPSSLSASVGDRVTITCRASQGISNYLAWYQQKPGKVPKLLIYAASTLQSGVPSRFSGSGSGTDFTLTISSLQPEDFATYYCQQSYSTPFTFGCGTKVEIKSGGGGSEVQLVESGGGLVQPGGSLKLSCAASGFTFNKYAINWVREAPGKGLEWVARIRSKYNNYATYYADAVKDRFTISRDDSKNTAYLQMNNLKTEDTAVYYCVRNANFGTSYISYFAYWGQGTLVTVSSGGGGSGGGGSGGGGSQTVVTQEPSLTVSPGGTVTLTCGSSTGAVTSGNYPNWVQKKPGQAPRGLIGGTKFLAPGTPARFSGSLLGGKAALTLSGVQPEDEAEYYCVLWYSNRWVFGSGTKLTVLGGGGSGGGGSGGGGSDKTHTCPPCPAPELLGGPSVFLFPPKPKDTLMISRTPEVTCVVVDVSHEDPEVKFNWYVDGVEVHNAKTKPCEEQYGSTYRCVSVLTVLHQDWLNGKEYKCKVSNKALPAPIEKTISKAKGQPREPQVYTLPPSREEMTKNQVSLTCLVKGFYPSDIAVEWESNGQPENNYKTTPPVLDSDGSFFLYSKLTVDKSRWQQGNVFSCSVMHEALHNHYTQKSLSLSPGKGGGGSGGGGSGGGGSGGGGSGGGGSGGGGSDKTHTCPPCPAPELLGGPSVFLFPPKPKDTLMISRTPEVTCVVVDVSHEDPEVKFNWYVDGVEVHNAKTKPCEEQYGSTYRCVSVLTVLHQDWLNGKEYKCKVSNKALPAPIEKTISKAKGQPREPQVYTLPPSREEMTKNQVSLTCLVKGFYPSDIAVEWESNGQPENNYKTTPPVLDSDGSFFLYSKLTVDKSRWQQGNVFSCSVMHEALHNHYTQKSLSLSPGKGGGGSGGGGSGGGGSQVQLVQSGAEVKKPGASVKVSCKASGYTFTSYWMHWVRQAPGQCLEWMGVIRTSTSYTIYNQKFKGRVTMTRDTSTSTVYMELSSLRSEDTAVYYCARSGPGYFDVWGQGTMVTVSSGGGGSGGGGSGGGGSDIQLTQSPSFLSASVGDRVTITCRASENIYSYLAWYQQKPGKAPKLLIYNAKTLAEGVPSRFSGSGSGTEFTLTISSLQPEDFATYYCQHNYGTPYTFGCGTKLEIKSGGGGSEVQLVESGGGLVQPGGSLKLSCAASGFTFNKYAINWVREAPGKGLEWVARIRSKYNNYATYYADAVKDRFTISRDDSKNTAYLQMNNLKTEDTAVYYCVRNANFGTSYISYFAYWGQGTLVTVSSGGGGSGGGGSGGGGSQTVVTQEPSLTVSPGGTVTLTCGSSTGAVTSGNYPNWVQKKPGQAPRGLIGGTKFLAPGTPARFSGSLLGGKAALTLSGVQPEDEAEYYCVLWYSNRWVFGSGTKLTVL

SEQ ID NO: 314 - protein, 1506 aa, Synthetic construct
QVQLQESGPGLVKPSETLSLTCTVSGGSISSSSYFWGWIRQPPGKCLEWIGNIYYSGSSNYNPSLKSRVTISVDTSKNQFSLKLSSVTAADTAVYYCARLPRGDRDAFDIWGQGTMVTVSSGGGGSGGGGSGGGGSDIVMTQSPSSLSASVGDRVTITCRASQGISNYLAWYQQKPGKVPKLLIYAASTLQSGVPSRFSGSGSGTDFTLTISSLQPEDFATYYCQQSYSTPFTFGCGTKVEIKSGGGGSEVQLVESGGGLVQPGGSLKLSCAASGFTFNKYAINWVREAPGKGLEWVARIRSKYNNYATYYADAVKDRFTISRDDSKNTAYLQMNNLKTEDTAVYYCVRNANFGTSYISYFAYWGQGTLVTVSSGGGGSGGGGSGGGGSQTVVTQEPSLTVSPGGTVTLTCGSSTGAVTSGNYPNWVQKKPGQAPRGLIGGTKFLAPGTPARFSGSLLGGKAALTLSGVQPEDEAEYYCVLWYSNRWVFGSGTKLTVLGGGGSGGGGSGGGGSDKTHTCPPCPAPELLGGPSVFLFPPKPKDTLMISRTPEVTCVVVDVSHEDPEVKFNWYVDGVEVHNAKTKPCEEQYGSTYRCVSVLTVLHQDWLNGKEYKCKVSNKALPAPIEKTISKAKGQPREPQVYTLPPSREEMTKNQVSLTCLVKGFYPSDIAVEWESNGQPENNYKTTPPVLDSDGSFFLYSKLTVDKSRWQQGNVFSCSVMHEALHNHYTQKSLSLSPGKGGGGSGGGGSGGGGSGGGGSGGGGSGGGGSDKTHTCPPCPAPELLGGPSVFLFPPKPKDTLMISRTPEVTCVVVDVSHEDPEVKFNWYVDGVEVHNAKTKPCEEQYGSTYRCVSVLTVLHQDWLNGKEYKCKVSNKALPAPIEKTISKAKGQPREPQVYTLPPSREEMTKNQVSLTCLVKGFYPSDIAVEWESNGQPENNYKTTPPVLDSDGSFFLYSKLTVDKSRWQQGNVFSCSVMHEALHNHYTQKSLSLSPGKGGGGSGGGGSGGGGSQVQLVQSGAEVKKPGASVKVSCKASGYTFTNYWMNWVRQAPGQCLEWMGNIHSKAHGTNYNQKFQGRVTMTVDTSSSTAYMELSRLRSDDTAVYYCATRYFYVMDYWGQGTLVTVSSGGGGSGGGGSGGGGSDIQMTQSPSSLSASVGDRVTITCRASQDISNYLNWYQQKPGKVPKLLIYYTSRLHSGVPSRFSGSGSGTDFTLTISSLQPEDVATYYCVQYAQFPLTFGCGTKVEIKSGGGGSEVQLVESGGGLVQPGGSLKLSCAASGFTFNKYAINWVREAPGKGLEWVARIRSKYNNYATYYADAVKDRFTISRDDSKNTAYLQMNNLKTEDTAVYYCVRNANFGTSYISYFAYWGQGTLVTVSSGGGGSGGGGSGGGGSQTVVTQEPSLTVSPGGTVTLTCGSSTGAVTSGNYPNWVQKKPGQAPRGLIGGTKFLAPGTPARFSGSLLGGKAALTLSGVQPEDEAEYYCVLWYSNRWVFGSGTKLTVL

SEQ ID NO: 315 - protein, 1506 aa, Synthetic construct
QVQLQESGPGLVKPSETLSLTCTVSGGSISSSSYFWGWIRQPPGKCLEWIGNIYYSGSSNYNPSLKSRVTISVDTSKNQFSLKLSSVTAADTAVYYCARLPRGDRDAFDIWGQGTMVTVSSGGGGSGGGGSGGGGSDIVMTQSPSSLSASVGDRVTITCRASQGISNYLAWYQQKPGKVPKLLIYAASTLQSGVPSRFSGSGSGTDFTLTISSLQPEDFATYYCQQSYSTPFTFGCGTKVEIKSGGGGSEVQLVESGGGLVQPGGSLKLSCAASGFTFNKYAMNWVRQAPGKCLEWVARIRSKYNNYATYYADSVKDRFTISRDDSKNTAYLQMNNLKTEDTAVYYCVRHGNFGNSYISYWAYWGQGTLVTVSSGGGGSGGGGSGGGGSQTVVTQEPSLTVSPGGTVTLTCGSSTGAVTSGNYPNWVQQKPGQAPRGLIGGTKFLAPGTPARFSGSLLGGKAALTLSGVQPEDEAEYYCVLWYSNRWVFGCGTKLTVLGGGGSGGGGSGGGGSDKTHTCPPCPAPELLGGPSVFLFPPKPKDTLMISRTPEVTCVVVDVSHEDPEVKFNWYVDGVEVHNAKTKPCEEQYGSTYRCVSVLTVLHQDWLNGKEYKCKVSNKALPAPIEKTISKAKGQPREPQVYTLPPSREEMTKNQVSLTCLVKGFYPSDIAVEWESNGQPENNYKTTPPVLDSDGSFFLYSKLTVDKSRWQQGNVFSCSVMHEALHNHYTQKSLSLSPGKGGGGSGGGGSGGGGSGGGGSGGGGSGGGGSDKTHTCPPCPAPELLGGPSVFLFPPKPKDTLMISRTPEVTCVVVDVSHEDPEVKFNWYVDGVEVHNAKTKPCEEQYGSTYRCVSVLTVLHQDWLNGKEYKCKVSNKALPAPIEKTISKAKGQPREPQVYTLPPSREEMTKNQVSLTCLVKGFYPSDIAVEWESNGQPENNYKTTPPVLDSDGSFFLYSKLTVDKSRWQQGNVFSCSVMHEALHNHYTQKSLSLSPGKGGGGSGGGGSGGGGSQVQLVQSGAEVKKPGASVKVSCKASGYTFTNYWMNWVRQAPGQCLEWMGNIAYGVKGTNYNQKFQGRVTMTVDTSSSTAYMELSRLRSDDTAVYYCATRYFYVMDYWGQGTLVTVSSGGGGSGGGGSGGGGSDIQMTQSPSSLSASVGDRVTITCRASQDISNYLNWYQQKPGKVPKLLIYYTSRLHSGVPSRFSGSGSGTDFTLTISSLQPEDVATYYCVQYAQFPLTFGCGTKVEIKSGGGGSEVQLVESGGGLVQPGGSLKLSCAASGFTFNKYAMNWVRQAPGKCLEWVARIRSKYNNYATYYADSVKDRFTISRDDSKNTAYLQMNNLKTEDTAVYYCVRHGNFGNSYISYWAYWGQGTLVTVSSGGGGSGGGGSGGGGSQTVVTQEPSLTVSPGGTVTLTCGSSTGAVTSGNYPNWVQQKPGQAPRGLIGGTKFLAPGTPARFSGSLLGGKAALTLSGVQPEDEAEYYCVLWYSNRWVFGCGTKLTVL

SEQ ID NO: 316 - protein, 1489 aa, Synthetic construct
QVQLQESGPGLVKPSETLSLTCTVSGGSISSSSYFWVWIRQPPGKCLEWIGSIYYSGSTYYNPSLKSRVTISVDTSKNQFSLKLNSVTAADTAVYYCARLPRGDRMTFDIWGQGTMVTVSSGGGGSGGGGSGGGGSEIVLTQSPGTLSLSPGERATLSCRASQSVSSSYLAWYQQKPGQAPRLLIYGASSRATGIPDRFSGSGSGTDFTLTISRLEPEDFAVYYCQQYGSSPFTFGCGTKLEIKSGGGGSEVQLVESGGGLVQPGGSLKLSCAASGFTFNKYAMNWVRQAPGKGMEWVARIRSKYNNYATYYADAVKDRFTISRDDSKNTLYLQMNNLKTEDTAVYYCVRAGNFGSSYISYFAYWGQGTLVTVSSGGGGSGGGGSGGGGSQTVVTQEPSLTVSPGGTVTITCGSSTGAVTSGNYPNWIQKKPGQAPRGLIGGTKFLAPGTPARFSGSLEGGKAALTLSGVQPEDEAEYYCVLYYSNRWVFGSGTKLTVLGGGGDKTHTCPPCPAPELLGGPSVFLFPPKPKDTLMISRTPEVTCVVVDVSHEDPEVKFNWYVDGVEVHNAKTKPCEEQYGSTYRCVSVLTVLHQDWLNGKEYKCKVSNKALPAPIEKTISKAKGQPREPQVYTLPPSREEMTKNQVSLTCLVKGFYPSDIAVEWESNGQPENNYKTTPPVLDSDGSFFLYSKLTVDKSRWQQGNVFSCSVMHEALHNHYTQKSLSLSPGKGGGGSGGGGSGGGGSGGGGSGGGGSGGGGSDKTHTCPPCPAPELLGGPSVFLFPPKPKDTLMISRTPEVTCVVVDVSHEDPEVKFNWYVDGVEVHNAKTKPCEEQYGSTYRCVSVLTVLHQDWLNGKEYKCKVSNKALPAPIEKTISKAKGQPREPQVYTLPPSREEMTKNQVSLTCLVKGFYPSDIAVEWESNGQPENNYKTTPPVLDSDGSFFLYSKLTVDKSRWQQGNVFSCSVMHEALHNHYTQKSLSLSPGKGGGGQVQLVQSGAEVVKPGASVKVSCKASGYTFTSSWMNWVRQAPGQCLEWMGRIYTGTGETKYSGKFQGRVTITRDTSASTAYMELSSLTSEDTAVYYCARQRDYGALYAMDYWGQGTLVTVSSGGGGSGGGGSGGGGSDIQLTQSPSFLSASVGDRVTITCRASDDIYSYLAWYQQKPGKAPKLLVYNAKTLAEGVPSRFSGSGSGTEFTLTISSLQPEDFATYYCQNHDRTPFTFGCGTKVDIKSGGGGSEVQLVESGGGLVQPGGSLKLSCAASGFTFNKYAMNWVRQAPGKGMEWVARIRSKYNNYATYYADAVKDRFTISRDDSKNTLYLQMNNLKTEDTAVYYCVRAGNFGSSYISYFAYWGQGTLVTVSSGGGGSGGGGSGGGGSQTVVTQEPSLTVSPGGTVTITCGSSTGAVTSGNYPNWIQKKPGQAPRGLIGGTKFLAPGTPARFSGSLEGGKAALTLSGVQPEDEAEYYCVLYYSNRWVFGSGTKLTVL

SEQ ID NO: 317 - protein, 1511 aa, Synthetic construct
QVQLQESGPGLVKPSETLSLTCTVSGGSISSSSYFWVWIRQPPGKCLEWIGSIYYSGSTYYNPSLKSRVTISVDTSKNQFSLKLNSVTAADTAVYYCARLPRGDRMTFDIWGQGTMVTVSSGGGGSGGGGSGGGGSEIVLTQSPGTLSLSPGERATLSCRASQSVSSSYLAWYQQKPGQAPRLLIYGASSRATGIPDRFSGSGSGTDFTLTISRLEPEDFAVYYCQQYGSSPFTFGCGTKLEIKSGGGGSEVQLVESGGGLVQPGGSLKLSCAASGFTFNKYAMNWVRQAPGKGMEWVARIRSKYNNYATYYADAVKDRFTISRDDSKNTLYLQMNNLKTEDTAVYYCVRAGNFGSSYISYFAYWGQGTLVTVSSGGGGSGGGGSGGGGSQTVVTQEPSLTVSPGGTVTITCGSSTGAVTSGNYPNWIQKKPGQAPRGLIGGTKFLAPGTPARFSGSLEGGKAALTLSGVQPEDEAEYYCVLYYSNRWVFGSGTKLTVLGGGGSGGGGSGGGGSDKTHTCPPCPAPELLGGPSVFLFPPKPKDTLMISRTPEVTCVVVDVSHEDPEVKFNWYVDGVEVHNAKTKPCEEQYGSTYRCVSVLTVLHQDWLNGKEYKCKVSNKALPAPIEKTISKAKGQPREPQVYTLPPSREEMTKNQVSLTCLVKGFYPSDIAVEWESNGQPENNYKTTPPVLDSDGSFFLYSKLTVDKSRWQQGNVFSCSVMHEALHNHYTQKSLSLSPGKGGGGSGGGGSGGGGSGGGGSGGGGSGGGGSDKTHTCPPCPAPELLGGPSVFLFPPKPKDTLMISRTPEVTCVVVDVSHEDPEVKFNWYVDGVEVHNAKTKPCEEQYGSTYRCVSVLTVLHQDWLNGKEYKCKVSNKALPAPIEKTISKAKGQPREPQVYTLPPSREEMTKNQVSLTCLVKGFYPSDIAVEWESNGQPENNYKTTPPVLDSDGSFFLYSKLTVDKSRWQQGNVFSCSVMHEALHNHYTQKSLSLSPGKGGGGSGGGGSGGGGSQVQLVQSGAEVVKPGASVKVSCKASGYTFTSSWMNWVRQAPGQCLEWMGRIYTGTGETKYSGKFQGRVTITRDTSASTAYMELSSLTSEDTAVYYCARQRDYGALYAMDYWGQGTLVTVSSGGGGSGGGGSGGGGSDIQLTQSPSFLSASVGDRVTITCRASDDIYSYLAWYQQKPGKAPKLLVYNAKTLAEGVPSRFSGSGSGTEFTLTISSLQPEDFATYYCQNHDRTPFTFGCGTKVDIKSGGGGSEVQLVESGGGLVQPGGSLKLSCAASGFTFNKYAMNWVRQAPGKGMEWVARIRSKYNNYATYYADAVKDRFTISRDDSKNTLYLQMNNLKTEDTAVYYCVRAGNFGSSYISYFAYWGQGTLVTVSSGGGGSGGGGSGGGGSQTVVTQEPSLTVSPGGTVTITCGSSTGAVTSGNYPNWIQKKPGQAPRGLIGGTKFLAPGTPARFSGSLEGGKAALTLSGVQPEDEAEYYCVLYYSNRWVFGSGTKLTVL

SEQ ID NO: 318 - protein, 1528 aa, Synthetic construct
QVQLVESGGGVVQPGRSLRLSCAASGFTFSSYGMGWVRQAPGKCLEWVAVISYHGSNKYYADAVKGRFTISRDNSKNTLYLQMNSLRAEDTAVYYCAREGAHFGSGSYYPLYYYYAMDVWGQGTTVTVSSGGGGSGGGGSGGGGSEIVTQSPGTLSLSPGERATLSCRASQSVSSSYLAWYQQKPGQAPRLLIYGASIRATGIPDRFSGSGSGTDFTLTISRLEPEDFAVYYCQQTGSSPIFTFGCGTKVEIKSGGGGSEVQLVESGGGLVQPGGSLKLSCAASGFTFNKYAMNWVRQAPGKCLEWVARIRSKYNNYATYYADSVKDRFTISRDDSKNTAYLQMNNLKTEDTAVYYCVRHGNFGNSYISYWAYWGQGTLVTVSSGGGGSGGGGSGGGGSQTVVTQEPSLTVSPGGTVTLTCGSSTGAVTSGNYPNWVQQKPGQAPRGLIGGTKFLAPGTPARFSGSLLGGKAALTLSGVQPEDEAEYYCVLWYSNRWVFGCGTKLTVLGGGGSGGGGSGGGGSDKTHTCPPCPAPELLGGPSVFLFPPKPKDTLMISRTPEVTCVVVDVSHEDPEVKFNWYVDGVEVHNAKTKPCEEQYGSTYRCVSVLTVLHQDWLNGKEYKCKVSNKALPAPIEKTISKAKGQPREPQVYTLPPSREEMTKNQVSLTCLVKGFYPSDIAVEWESNGQPENNYKTTPPVLDSDGSFFLYSKLTVDKSRWQQGNVFSCSVMHEALHNHYTQKSLSLSPGKGGGGSGGGGSGGGGSGGGGSGGGGSGGGGSDKTHTCPPCPAPELLGGPSVFLFPPKPKDTLMISRTPEVTCVVVDVSHEDPEVKFNWYVDGVEVHNAKTKPCEEQYGSTYRCVSVLTVLHQDWLNGKEYKCKVSNKALPAPIEKTISKAKGQPREPQVYTLPPSREEMTKNQVSLTCLVKGFYPSDIAVEWESNGQPENNYKTTPPVLDSDGSFFLYSKLTVDKSRWQQGNVFSCSVMHEALHNHYTQKSLSLSPGKGGGGSGGGGSGGGGSEVQLLESGGGLVQPGGSLRLSCAASGFSFSSYPINWVRQAPGKCLEWVGVIWTGGGTNYASSVKGRFTISRDNSKNTVYLQMNSLRAEDTAVYYCAKSRGVYDFKGRGAMDYWGQGTLVTVSSGGGGSGGGGSGGGGSDIVMTQSPDSLAVSLGERATINCKSSQSLLYSSNQKNYFAWYQQKPGQPPKLLIYWASTRESGVPDRFSGSGSGTDFTLTISSLQAEDVAVYYCQQYYSYPYTFGCGTKLEIKSGGGGSEVQLVESGGGLVQPGGSLKLSCAASGFTFNKYAMNWVRQAPGKCLEWVARIRSKYNNYATYYADSVKDRFTISRDDSKNTAYLQMNNLKTEDTAVYYCVRHGNFGNSYISYWAYWGQGTLVTVSSGGGGSGGGGSGGGGSQTVVTQEPSLTVSPGGTVTLTCGSSTGAVTSGNYPNWVQQKPGQAPRGLIGGTKFLAPGTPARFSGSLLGGKAALTLSGVQPEDEAEYYCVLWYSNRWVFGCGTKLTVL

SEQ ID NO: 319 - protein, 1509 aa, Synthetic construct
QVQLVQSGAEVKKPGASVKVSCKASGYTFTGYYIHWVRQAPGQCLEWMGWINPNSGGTNYAQKFQGRVTMTRDTSISTAYMELSRLRSDDTAVYYCARVEAVAGREYYYFSGMDVWGQGTTVTVSSGGGGSGGGGSGGGGSSYELTQPPSVSVSPGQTASITCSGEKLGDKYVYWYQQKPGQSPVLVIYQSTKRPSGVPERFSGSNSGNTATLTISGTQAMDEADYYCQAYHASTAVFGCGTKLTVLSGGGGSEVQLVESGGGLVQPGGSLKLSCAASGFTFNKYAMNWVRQAPGKCLEWVARIRSKYNNYATYYADSVKDRFTISRDDSKNTAYLQMNNLKTEDTAVYYCVRHGNFGNSYISYWAYWGQGTLVTVSSGGGGSGGGGSGGGGSQTVVTQEPSLTVSPGGTVTLTCGSSTGAVTSGNYPNWVQQKPGQAPRGLIGGTKFLAPGTPARFSGSLLGGKAALTLSGVQPEDEAEYYCVLWYSNRWVFGCGTKLTVLGGGGSGGGGSGGGGSDKTHTCPPCPAPELLGGPSVFLFPPKPKDTLMISRTPEVTCVVVDVSHEDPEVKFNWYVDGVEVHNAKTKPCEEQYGSTYRCVSVLTVLHQDWLNGKEYKCKVSNKALPAPIEKTISKAKGQPREPQVYTLPPSREEMTKNQVSLTCLVKGFYPSDIAVEWESNGQPENNYKTTPPVLDSDGSFFLYSKLTVDKSRWQQGNVFSCSVMHEALHNHYTQKSLSLSPGKGGGGSGGGGSGGGGSGGGGSGGGGSGGGGSDKTHTCPPCPAPELLGGPSVFLFPPKPKDTLMISRTPEVTCVVVDVSHEDPEVKFNWYVDGVEVHNAKTKPCEEQYGSTYRCVSVLTVLHQDWLNGKEYKCKVSNKALPAPIEKTISKAKGQPREPQVYTLPPSREEMTKNQVSLTCLVKGFYPSDIAVEWESNGQPENNYKTTPPVLDSDGSFFLYSKLTVDKSRWQQGNVFSCSVMHEALHNHYTQKSLSLSPGKGGGGSGGGGSGGGGSEVQLLESGGGLVQPGGSLRLSCAASGFTFSSYWMHWVRQTPGKCLEWVSKIDPSDDYTNYNQKVKGRFTISIDKSKNTLYLQMNSLRAEDTAVYYCARWDYSHFDVWGQGTTVTVSSGGGGSGGGGSGGGGSEIVMTQSPATLSVSPGERATLTCRASSSVSYMHWYQQKPGQAPRLLIYGTSNLVSGVPARFSGSGSGTEFTLTISSLQSEDFAVYYCQQWSSYPLTFGCGTKVEIKSGGGGSEVQLVESGGGLVQPGGSLKLSCAASGFTFNKYAMNWVRQAPGKCLEWVARIRSKYNNYATYYADSVKDRFTISRDDSKNTAYLQMNNLKTEDTAVYYCVRHGNFGNSYISYWAYWGQGTLVTVSSGGGGSGGGGSGGGGSQTVVTQEPSLTVSPGGTVTLTCGSSTGAVTSGNYPNWVQQKPGQAPRGLIGGTKFLAPGTPARFSGSLLGGKAALTLSGVQPEDEAEYYCVLWYSNRWVFGCGTKLTVL

SEQ ID NO: 320 - protein, 1509 aa, Synthetic construct
QVQLVQSGAEVKKPGASVKVSCKASGYTFTGYYIHWVRQAPGQCLEWMGWINPNSGGTNYAQKFQGRVTMTRDTSISTAYMELSRLRSDDTAVYYCARVEAVAGREYYYFSGMDVWGQGTTVTVSSGGGGSGGGGSGGGGSSYELTQPPSVSVSPGQTASITCSGEKLGDKYVYWYQQKPGQSPVLVIYQSTKRPSGVPERFSGSNSGNTATLTISGTQAMDEADYYCQAYHASTAVFGCGTKLTVLSGGGGSEVQLVESGGGLVQPGGSLKLSCAASGFTFNKYAMNWVRQAPGKCLEWVARIRSKYNNYATYYADSVKDRFTISRDDSKNTAYLQMNNLKTEDTAVYYCVRHGNFGNSYISYWAYWGQGTLVTVSSGGGGSGGGGSGGGGSQTVVTQEPSLTVSPGGTVTLTCGSSTGAVTSGNYPNWVQQKPGQAPRGLIGGTKFLAPGTPARFSGSLLGGKAALTLSGVQPEDEAEYYCVLWYSNRWVFGCGTKLTVLGGGGSGGGGSGGGGSDKTHTCPPCPAPELLGGPSVFLFPPKPKDTLMISRTPEVTCVVVDVSHEDPEVKFNWYVDGVEVHNAKTKPCEEQYGSTYRCVSVLTVLHQDWLNGKEYKCKVSNKALPAPIEKTISKAKGQPREPQVYTLPPSREEMTKNQVSLTCLVKGFYPSDIAVEWESNGQPENNYKTTPPVLDSDGSFFLYSKLTVDKSRWQQGNVFSCSVMHEALHNHYTQKSLSLSPGKGGGGSGGGGSGGGGSGGGGSGGGGSGGGGSDKTHTCPPCPAPELLGGPSVFLFPPKPKDTLMISRTPEVTCVVVDVSHEDPEVKFNWYVDGVEVHNAKTKPCEEQYGSTYRCVSVLTVLHQDWLNGKEYKCKVSNKALPAPIEKTISKAKGQPREPQVYTLPPSREEMTKNQVSLTCLVKGFYPSDIAVEWESNGQPENNYKTTPPVLDSDGSFFLYSKLTVDKSRWQQGNVFSCSVMHEALHNHYTQKSLSLSPGKGGGGSGGGGSGGGGSEVQLLESGGGLVQPGGSLRLSCAASGFTFSSYWMHWVRQTPGKCLEWVSKIDPSDDYTNYNQKVKGRFTISIDKSKNTLYLQMNSLRAEDTAVYYCARWDYNYFDVWGQGTTVTVSSGGGGSGGGGSGGGGSEIVMTQSPATLSVSPGERATLTCRASSSVSYMHWYQQKPGQAPRLLIYGTSNLVSGVPARFSGSGSGTEFTLTISSLQSEDFAVYYCQQWSSYPLTFGCGTKVEIKSGGGGSEVQLVESGGGLVQPGGSLKLSCAASGFTFNKYAMNWVRQAPGKCLEWVARIRSKYNNYATYYADSVKDRFTISRDDSKNTAYLQMNNLKTEDTAVYYCVRHGNFGNSYISYWAYWGQGTLVTVSSGGGGSGGGGSGGGGSQTVVTQEPSLTVSPGGTVTLTCGSSTGAVTSGNYPNWVQQKPGQAPRGLIGGTKFLAPGTPARFSGSLLGGKAALTLSGVQPEDEAEYYCVLWYSNRWVFGCGTKLTVL

SEQ ID NO: 321 - protein, 1509 aa, Synthetic construct
QVQLVQSGAEVKKPGASVKVSCKASGYTFTGYYIHWVRQAPGQCLEWMGWINPNSGGTNYAQKFQGRVTMTRDTSISTAYMELSRLRSDDTAVYYCARVEAVAGREYYYFSGMDVWGQGTTVTVSSGGGGSGGGGSGGGGSSYELTQPPSVSVSPGQTASITCSGEKLGDKYVYWYQQKPGQSPVLVIYQSTKRPSGVPERFSGSNSGNTATLTISGTQAMDEADYYCQAYHASTAVFGCGTKLTVLSGGGGSEVQLVESGGGLVQPGGSLKLSCAASGFTFNKYAMNWVRQAPGKCLEWVARIRSKYNNYATYYADSVKDRFTISRDDSKNTAYLQMNNLKTEDTAVYYCVRHGNFGNSYISYWAYWGQGTLVTVSSGGGGSGGGGSGGGGSQTVVTQEPSLTVSPGGTVTLTCGSSTGAVTSGNYPNWVQQKPGQAPRGLIGGTKFLAPGTPARFSGSLLGGKAALTLSGVQPEDEAEYYCVLWYSNRWVFGCGTKLTVLGGGGSGGGGSGGGGSDKTHTCPPCPAPELLGGPSVFLFPPKPKDTLMISRTPEVTCVVVDVSHEDPEVKFNWYVDGVEVHNAKTKPCEEQYGSTYRCVSVLTVLHQDWLNGKEYKCKVSNKALPAPIEKTISKAKGQPREPQVYTLPPSREEMTKNQVSLTCLVKGFYPSDIAVEWESNGQPENNYKTTPPVLDSDGSFFLYSKLTVDKSRWQQGNVFSCSVMHEALHNHYTQKSLSLSPGKGGGGSGGGGSGGGGSGGGGSGGGGSGGGGSDKTHTCPPCPAPELLGGPSVFLFPPKPKDTLMISRTPEVTCVVVDVSHEDPEVKFNWYVDGVEVHNAKTKPCEEQYGSTYRCVSVLTVLHQDWLNGKEYKCKVSNKALPAPIEKTISKAKGQPREPQVYTLPPSREEMTKNQVSLTCLVKGFYPSDIAVEWESNGQPENNYKTTPPVLDSDGSFFLYSKLTVDKSRWQQGNVFSCSVMHEALHNHYTQKSLSLSPGKGGGGSGGGGSGGGGSEVQLLESGGGLVQPGGSVRLSCAASGFTFSSYWMYWVRQAPGKCLEWVSKIDPSDDYTNYNQKVKGRFTISIDNSKNTLYLQMNSLRAEDSAVYYCARWDYTHFDVWGQGTTVTVSSGGGGSGGGGSGGGGSEIVMTQSPATLSVSPGERATLSCRASSSVSYMHWYQQKPGQAPRLLIYGTSNLASGVPVRFSGSGSGTEFTLTISRLQSEDVAVYYCQQWSSYPLTFGCGTKVEIKSGGGGSEVQLVESGGGLVQPGGSLKLSCAASGFTFNKYAMNWVRQAPGKCLEWVARIRSKYNNYATYYADSVKDRFTISRDDSKNTAYLQMNNLKTEDTAVYYCVRHGNFGNSYISYWAYWGQGTLVTVSSGGGGSGGGGSGGGGSQTVVTQEPSLTVSPGGTVTLTCGSSTGAVTSGNYPNWVQQKPGQAPRGLIGGTKFLAPGTPARFSGSLLGGKAALTLSGVQPEDEAEYYCVLWYSNRWVFGCGTKLTVL

SEQ ID NO: 322 - protein, 1487 aa, Synthetic construct
QVQLVQSGAEVKKPGASVKVSCKASGYTFTGYYIHWVRQAPGQCLEWMGWINPNSGGTNYAQKFQGRVTMTRDTSISTAYMELSRLRSDDTAVYYCARVEAVAGREYYYFSGMDVWGQGTTVTVSSGGGGSGGGGSGGGGSSYELTQPPSVSVSPGQTASITCSGEKLGDKYVYWYQQKPGQSPVLVIYQSTKRPSGVPERFSGSNSGNTATLTISGTQAMDEADYYCQAYHASTAVFGCGTKLTVLSGGGGSEVQLVESGGGLVQPGGSLKLSCAASGFTFNKYAMNWVRQAPGKCLEWVARIRSKYNNYATYYADSVKDRFTISRDDSKNTAYLQMNNLKTEDTAVYYCVRHGNFGNSYISYWAYWGQGTLVTVSSGGGGSGGGGSGGGGSQTVVTQEPSLTVSPGGTVTLTCGSSTGAVTSGNYPNWVQQKPGQAPRGLIGGTKFLAPGTPARFSGSLLGGKAALTLSGVQPEDEAEYYCVLWYSNRWVFGCGTKLTVLGGGGDKTHTCPPCPAPELLGGPSVFLFPPKPKDTLMISRTPEVTCVVVDVSHEDPEVKFNWYVDGVEVHNAKTKPCEEQYGSTYRCVSVLTVLHQDWLNGKEYKCKVSNKALPAPIEKTISKAKGQPREPQVYTLPPSREEMTKNQVSLTCLVKGFYPSDIAVEWESNGQPENNYKTTPPVLDSDGSFFLYSKLTVDKSRWQQGNVFSCSVMHEALHNHYTQKSLSLSPGKGGGGSGGGGSGGGGSGGGGSGGGGSGGGGSDKTHTCPPCPAPELLGGPSVFLFPPKPKDTLMISRTPEVTCVVVDVSHEDPEVKFNWYVDGVEVHNAKTKPCEEQYGSTYRCVSVLTVLHQDWLNGKEYKCKVSNKALPAPIEKTISKAKGQPREPQVYTLPPSREEMTKNQVSLTCLVKGFYPSDIAVEWESNGQPENNYKTTPPVLDSDGSFFLYSKLTVDKSRWQQGNVFSCSVMHEALHNHYTQKSLSLSPGKGGGGEVQLLESGGGLVQPGGSLRLSCAASGFTFSSYWMHWVRQTPGKCLEWVSKIDPSDDYTNYNQKVKGRFTISIDKSKNTLYLQMNSLRAEDTAVYYCARWDYNYFDVWGQGTTVTVSSGGGGSGGGGSGGGGSEIVMTQSPATLSVSPGERATLTCRASSSVSYMHWYQQKPGQAPRLLIYGTSNLVSGVPARFSGSGSGTEFTLTISSLQSEDFAVYYCQQWSSYPLTFGCGTKVEIKSGGGGSEVQLVESGGGLVQPGGSLKLSCAASGFTFNKYAMNWVRQAPGKCLEWVARIRSKYNNYATYYADSVKDRFTISRDDSKNTAYLQMNNLKTEDTAVYYCVRHGNFGNSYISYWAYWGQGTLVTVSSGGGGSGGGGSGGGGSQTVVTQEPSLTVSPGGTVTLTCGSSTGAVTSGNYPNWVQQKPGQAPRGLIGGTKFLAPGTPARFSGSLLGGKAALTLSGVQPEDEAEYYCVLWYSNRWVFGCGTKLTVL

SEQ ID NO: 323 - protein, 1496 aa, Synthetic construct
QVQLQESGPGLVKPSETLSLTCTVSGGSISSSSYFWGWIRQPPGKCLEWIGNIYYSGSSNYNPSLKSRVTISVDTSKNQFSLKLSSVTAADTAVYYCARLPRGDRDAFDIWGQGTMVTVSSGGGGQGGGGQGGGGQDIVMTQSPSSLSASVGDRVTITCRASQGISNYLAWYQQKPGKVPKLLIYAASTLQSGVPSRFSGSGSGTDFTLTISSLQPEDFATYYCQQSYSTPFTFGCGTKVEIKSGGGGQEVQLVESGGGLVQPGGSLKLSCAASGFTFNKYAINWVREAPGKGLEWVARIRSKYNNYATYYADAVKDRFTISRDDSKNTAYLQMNNLKTEDTAVYYCVRNANFGTSYISYFAYWGQGTLVTVSSGGGGQGGGGQGGGGQQTVVTQEPSLTVSPGGTVTLTCGSSTGAVTSGNYPNWVQKKPGQAPRGLIGGTKFLAPGTPARFSGSLLGGKAALTLSGVQPEDEAEYYCVLWYSNRWVFGSGTKLTVLGGGGQGGGGQGGGGQCPPCPAPELLGGPSVFLFPPKPKDTLMISRTPEVTCVVVDVSHEEPEVKFNWYVDGVEVHNAKTKPCEEQYGSTYRCVSVLTVLHQDWLNGKEYKCKVSNKALPAPIEKTISKAKGQPREPQVYTLPPSREEMTKNQVSLTCLVKGFYPSDIAVEWESNGQPENNYKTTPPVLDSDGSFFLYSKLTVDKSRWQQGNVFSCSVMHEALHNHYTQKSLSLSPGKGGGGQGGGGQGGGGQGGGGQGGGGQGGGGQCPPCPAPELLGGPSVFLFPPKPKDTLMISRTPEVTCVVVDVSHEEPEVKFNWYVDGVEVHNAKTKPCEEQYGSTYRCVSVLTVLHQDWLNGKEYKCKVSNKALPAPIEKTISKAKGQPREPQVYTLPPSREEMTKNQVSLTCLVKGFYPSDIAVEWESNGQPENNYKTTPPVLDSDGSFFLYSKLTVDKSRWQQGNVFSCSVMHEALHNHYTQKSLSLSPGKGGGGQGGGGQGGGGQQVQLVQSGAEVKKPGASVKVSCKASGYTFTNYWMNWVRQAPGQCLEWMGNIHSKAHGTNYNQKFQGRVTMTVDTSSSTAYMELSRLRSDDTAVYYCATRYFYVMDYWGQGTLVTVSSGGGGQGGGGQGGGGQDIQMTQSPSSLSASVGDRVTITCRASQDISNYLNWYQQKPGKVPKLLIYYTSRLHSGVPSRFSGSGSGTDFTLTISSLQPEDVATYYCVQYAQFPLTFGCGTKVEIKSGGGGQEVQLVESGGGLVQPGGSLKLSCAASGFTFNKYAINWVREAPGKGLEWVARIRSKYNNYATYYADAVKDRFTISRDDSKNTAYLQMNNLKTEDTAVYYCVRNANFGTSYISYFAYWGQGTLVTVSSGGGGQGGGGQGGGGQQTVVTQEPSLTVSPGGTVTLTCGSSTGAVTSGNYPNWVQKKPGQAPRGLIGGTKFLAPGTPARFSGSLLGGKAALTLSGVQPEDEAEYYCVLWYSNRWVFGSGTKLTVL

SEQ ID NO: 324 - protein, 729 aa, Synthetic construct
DKTHTCPPCPAPELLGGPSVFLFPPKPKDTLMISRTPEVTCVVVDVSHEDPEVKFNWYVDGVEVHNAKTKPCEEQYGSTYRCVSVLTVLHQDWLNGKEYKCKVSNKALPAPIEKTISKAKGQPREPQVYTLPPSREEMTKNQVSLTCLVKGFYPSDIAVEWESNGQPENNYDTTPPVLDSDGSFFLYSDLTVDKSRWQQGNVFSCSVMHEALHNHYTQDSLSLSPGKGGGGQVQLQESGPGLVKPSETLSLTCTVSGGSISSSSYFWGWIRQPPGKCLEWIGNIYYSGSSNYNPSLKSRVTISVDTSKNQFSLKLSSVTAADTAVYYCARLPRGDRDAFDIWGQGTMVTVSSGGGGSGGGGSGGGGSDIVMTQSPSSLSASVGDRVTITCRASQGISNYLAWYQQKPGKVPKLLIYAASTLQSGVPSRFSGSGSGTDFTLTISSLQPEDFATYYCQQSYSTPFTFGCGTKVEIKSGGGGSEVQLVESGGGLVQPGGSLKLSCAASGFTFNKYAMNWVRQAPGKGMEWVARIRSKYNNYATYYADAVKDRFTISRDDSKNTLYLQMNNLKTEDTAVYYCVRAGNFGSSYISYFAYWGQGTLVTVSSGGGGSGGGGSGGGGSQTVVTQEPSLTVSPGGTVTITCGSSTGAVTSGNYPNWIQKKPGQAPRGLIGGTKFLAPGTPARFSGSLEGGKAALTLSGVQPEDEAEYYCVLYYSNRWVFGSGTKLTVL

SEQ ID NO: 325 - protein, 725 aa, Synthetic construct
QVQLVQSGAEVKKPGASVKVSCKASGYTFTNYWMNWVRQAPGQCLEWMGNIAYGVKGTNYNQKFQGRVTMTVDTSSSTAYMELSRLRSDDTAVYYCATRYFYVMDYWGQGTLVTVSSGGGGSGGGGSGGGGSDIQMTQSPSSLSASVGDRVTITCRASQDISNYLNWYQQKPGKVPKLLIYYTSRLHSGVPSRFSGSGSGTDFTLTISSLQPEDVATYYCVQYAQFPLTFGCGTKVEIKSGGGGSEVQLVESGGGLVQPGGSLKLSCAASGFTFNKYAMNWVRQAPGKGMEWVARIRSKYNNYATYYADAVKDRFTISRDDSKNTLYLQMNNLKTEDTAVYYCVRAGNFGSSYISYFAYWGQGTLVTVSSGGGGSGGGGSGGGGSQTVVTQEPSLTVSPGGTVTITCGSSTGAVTSGNYPNWIQKKPGQAPRGLIGGTKFLAPGTPARFSGSLEGGKAALTLSGVQPEDEAEYYCVLYYSNRWVFGSGTKLTVLGGGGDKTHTCPPCPAPELLGGPSVFLFPPKPKDTLMISRTPEVTCVVVDVSHEDPEVKFNWYVDGVEVHNAKTKPCEEQYGSTYRCVSVLTVLHQDWLNGKEYKCKVSNKALPAPIEKTISKAKGQPREPQVYTLPPSRKEMTKNQVSLTCLVKGFYPSDIAVEWESNGQPENNYKTTPPVLKSDGSFFLYSKLTVDKSRWQQGNVFSCSVMHEALHNHYTQKSLSLSPGK

SEQ ID NO: 326 - protein, 725 aa, Synthetic construct
DKTHTCPPCPAPELLGGPSVFLFPPKPKDTLMISRTPEVTCVVVDVSHEDPEVKFNWYVDGVEVHNAKTKPCEEQYGSTYRCVSVLTVLHQDWLNGKEYKCKVSNKALPAPIEKTISKAKGQPREPQVYTLPPSRKEMTKNQVSLTCLVKGFYPSDIAVEWESNGQPENNYKTTPPVLKSDGSFFLYSKLTVDKSRWQQGNVFSCSVMHEALHNHYTQKSLSLSPGKGGGGQVQLVQSGAEVKKPGASVKVSCKASGYTFTNYWMNWVRQAPGQCLEWMGNIAYGVKGTNYNQKFQGRVTMTVDTSSSTAYMELSRLRSDDTAVYYCATRYFYVMDYWGQGTLVTVSSGGGGSGGGGSGGGGSDIQMTQSPSSLSASVGDRVTITCRASQDISNYLNWYQQKPGKVPKLLIYYTSRLHSGVPSRFSGSGSGTDFTLTISSLQPEDVATYYCVQYAQFPLTFGCGTKVEIKSGGGGSEVQLVESGGGLVQPGGSLKLSCAASGFTFNKYAMNWVRQAPGKGMEWVARIRSKYNNYATYYADAVKDRFTISRDDSKNTLYLQMNNLKTEDTAVYYCVRAGNFGSSYISYFAYWGQGTLVTVSSGGGGSGGGGSGGGGSQTVVTQEPSLTVSPGGTVTITCGSSTGAVTSGNYPNWIQKKPGQAPRGLIGGTKFLAPGTPARFSGSLEGGKAALTLSGVQPEDEAEYYCVLYYSNRWVFGSGTKLTVL

SEQ ID NO: 327 - protein, 729 aa, Synthetic construct
QVQLQESGPGLVKPSETLSLTCTVSGGSISSSSYFWGWIRQPPGKCLEWIGNIYYSGSSNYNPSLKSRVTISVDTSKNQFSLKLSSVTAADTAVYYCARLPRGDRDAFDIWGQGTMVTVSSGGGGSGGGGSGGGGSDIVMTQSPSSLSASVGDRVTITCRASQGISNYLAWYQQKPGKVPKLLIYAASTLQSGVPSRFSGSGSGTDFTLTISSLQPEDFATYYCQQSYSTPFTFGCGTKVEIKSGGGGSEVQLVESGGGLVQPGGSLKLSCAASGFTFNKYAMNWVRQAPGKGMEWVARIRSKYNNYATYYADAVKDRFTISRDDSKNTLYLQMNNLKTEDTAVYYCVRAGNFGSSYISYFAYWGQGTLVTVSSGGGGSGGGGSGGGGSQTVVTQEPSLTVSPGGTVTITCGSSTGAVTSGNYPNWIQKKPGQAPRGLIGGTKFLAPGTPARFSGSLEGGKAALTLSGVQPEDEAEYYCVLYYSNRWVFGSGTKLTVLGGGGDKTHTCPPCPAPELLGGPSVFLFPPKPKDTLMISRTPEVTCVVVDVSHEDPEVKFNWYVDGVEVHNAKTKPCEEQYGSTYRCVSVLTVLHQDWLNGKEYKCKVSNKALPAPIEKTISKAKGQPREPQVYTLPPSREEMTKNQVSLTCLVKGFYPSDIAVEWESNGQPENNYDTTPPVLDSDGSFFLYSDLTVDKSRWQQGNVFSCSVMHEALHNHYTQDSLSLSPGK

SEQ ID NO: 328 - protein, 785 aa, Synthetic construct
QVQLQESGPGLVKPSETLSLTCTVSGGSISSSSYFWGWIRQPPGKCLEWIGNIYYSGSSNYNPSLKSRVTISVDTSKNQFSLKLSSVTAADTAVYYCARLPRGDRDAFDIWGQGTMVTVSSGGGGSGGGGSGGGGSGGGGSEVQLVESGGGLVQPGGSLKLSCAASGFTFNKYAMNWVRQAPGKGMEWVARIRSKYNNYATYYADAVKDRFTISRDDSKNTLYLQMNNLKTEDTAVYYCVRAGNFGSSYISYFAYWGQGTLVTVSSGGGGSGGGGSGGGGSDKTHTCPPCPAPELLGGPSVFLFPPKPKDTLMISRTPEVTCVVVDVSHEDPEVKFNWYVDGVEVHNAKTKPCEEQYGSTYRCVSVLTVLHQDWLNGKEYKCKVSNKALPAPIEKTISKAKGQPREPQVYTLPPSREEMTKNQVSLTCLVKGFYPSDIAVEWESNGQPENNYDTTPPVLDSDGSFFLYSDLTVDKSRWQQGNVFSCSVMHEALHNHYTQDSLSLSPGKGGGGSGGGGSGGGGSQVQLVQSGAEVKKPGASVKVSCKASGYTFTNYWMNWVRQAPGQCLEWMGNIAYGVKGTNYNQKFQGRVTMTVDTSSSTAYMELSRLRSDDTAVYYCATRYFYVMDYWGQGTLVTVSSGGGGSGGGGSGGGGSGGGGSEVQLVESGGGLVQPGGSLKLSCAASGFTFNKYAMNWVRQAPGKGMEWVARIRSKYNNYATYYADAVKDRFTISRDDSKNTLYLQMNNLKTEDTAVYYCVRAGNFGSSYISYFAYWGQGTLVTVSS

SEQ ID NO: 329 - protein, 731 aa, Synthetic construct
DIVMTQSPSSLSASVGDRVTITCRASQGISNYLAWYQQKPGKVPKLLIYAASTLQSGVPSRFSGSGSGTDFTLTISSLQPEDFATYYCQQSYSTPFTFGCGTKVEIKSGGGGSGGGGSGGGGSGGGGSQTVVTQEPSLTVSPGGTVTITCGSSTGAVTSGNYPNWIQKKPGQAPRGLIGGTKFLAPGTPARFSGSLEGGKAALTLSGVQPEDEAEYYCVLYYSNRWVFGSGTKLTVLGGGGSGGGGSGGGGSDKTHTCPPCPAPELLGGPSVFLFPPKPKDTLMISRTPEVTCVVVDVSHEDPEVKFNWYVDGVEVHNAKTKPCEEQYGSTYRCVSVLTVLHQDWLNGKEYKCKVSNKALPAPIEKTISKAKGQPREPQVYTLPPSRKEMTKNQVSLTCLVKGFYPSDIAVEWESNGQPENNYKTTPPVLKSDGSFFLYSKLTVDKSRWQQGNVFSCSVMHEALHNHYTQKSLSLSPGKGGGGSGGGGSGGGGSDIQMTQSPSSLSASVGDRVTITCRASQDISNYLNWYQQKPGKVPKLLIYYTSRLHSGVPSRFSGSGSGTDFTLTISSLQPEDVATYYCVQYAQFPLTFGCGTKVEIKSGGGGSGGGGSGGGGSGGGGSQTVVTQEPSLTVSPGGTVTITCGSSTGAVTSGNYPNWIQKKPGQAPRGLIGGTKFLAPGTPARFSGSLEGGKAALTLSGVQPEDEAEYYCVLYYSNRWVFGSGTKLTVL

SEQ ID NO: 330 - protein, 10 aa, Synthetic construct
DKTHTCPPCP

SEQ ID NO: 331 - protein, 12 aa, Synthetic construct
ERKCCVECPPCP

SEQ ID NO: 332 - protein, 16 aa, Synthetic construct
ELKTPLDTTHTCPRCP

SEQ ID NO: 333 - protein, 17 aa, Synthetic construct
ELKTPLGDTTHTCPRCP

SEQ ID NO: 334 - protein, 5 aa, Synthetic construct
NYWLG

SEQ ID NO: 335 - protein, 17 aa, Synthetic construct
DIFPGSGNIHYNEKFKG

SEQ ID NO: 336 - protein, 10 aa, Synthetic construct
LRNWDEPMDY

SEQ ID NO: 337 - protein, 17 aa, Synthetic construct
KSSQSLLNSGNQKNYLT

SEQ ID NO: 338 - protein, 7 aa, Synthetic construct
WASTRES

SEQ ID NO: 339 - protein, 9 aa, Synthetic construct
QNDYSYPLT

SEQ ID NO: 340 - protein, 120 aa, Synthetic construct
EVQLLEQSGAELVRPGTSVKISCKASGYAFTNYWLGWVKQRPGHGLEWIGDIFPGSGNIHYNEKFKGKATLTADKSSSTAYMQLSSLTFEDSAVYFCARLRNWDEPMDYWGQGTTVTVSS

SEQ ID NO: 341 - protein, 113 aa, Synthetic construct
ELVMTQSPSSLTVTAGEKVTMSCKSSQSLLNSGNQKNYLTWYQQKPGQPPKLLIYWASTRESGVPDRFTGSGSGTDFTLTISSVQAEDLAVYYCQNDYSYPLTFGAGTKLEIK

SEQ ID NO: 342 - protein, 1513 aa, Synthetic construct
ELVMTQSPSSLTVTAGEKVTMSCKSSQSLLNSGNQKNYLTWYQQKPGQPPKLLIYWASTRESGVPDRFTGSGSGTDFTLTISSVQAEDLAVYYCQNDYSYPLTFGAGTKLEIKGGGGSGGGGSGGGGSEVQLLEQSGAELVRPGTSVKISCKASGYAFTNYWLGWVKQRPGHGLEWIGDIFPGSGNIHYNEKFKGKATLTADKSSSTAYMQLSSLTFEDSAVYFCARLRNWDEPMDYWGQGTTVTVSSGGGGDKTHTCPPCPAPELLGGPSVFLFPPKPKDTLMISRTPEVTCVVVDVSHEDPEVKFNWYVDGVEVHNAKTKPCEEQYGSTYRCVSVLTVLHQDWLNGKEYKCKVSNKALPAPIEKTISKAKGQPREPQVYTLPPSREEMTKNQVSLTCLVKGFYPSDIAVEWESNGQPENNYKTTPPVLDSDGSFFLYSKLTVDKSRWQQGNVFSCSVMHEALHNHYTQKSLSLSPGKGGGGSGGGGSGGGGSGGGGSGGGGSGGGGSDKTHTCPPCPAPELLGGPSVFLFPPKPKDTLMISRTPEVTCVVVDVSHEDPEVKFNWYVDGVEVHNAKTKPCEEQYGSTYRCVSVLTVLHQDWLNGKEYKCKVSNKALPAPIEKTISKAKGQPREPQVYTLPPSREEMTKNQVSLTCLVKGFYPSDIAVEWESNGQPENNYKTTPPVLDSDGSFFLYSKLTVDKSRWQQGNVFSCSVMHEALHNHYTQKSLSLSPGKGGGGEVQLLESGGGVVQPGRSLRLSCAASGFTFSSYGMGWVRQAPGKGLEWVAVISYDGSNKYYADSVKGRFTISRDNSKNTLYLQMNSLRAEDTAVYYCAREGAHFGSGSYYPLYYYYAMDVWGQGTTVTVSSGGGGSGGGGSGGGGSELTLTQSPGTLSLSPGERATLSCRASQSVSSSYLAWYQQKPGQAPRLLIYGASIRATGIPDRFSGSGSGTDFTLTISRLEPEDFAVYYCQQYGSSPIFTFGPGTKVEIKSGGGGSEVQLVESGGGLVQPGGSLKLSCAASGFTFNKYAMNWVRQAPGKCLEWVARIRSKYNNYATYYADSVKDRFTISRDDSKNTAYLQMNNLKTEDTAVYYCVRHGNFGNSYISYWAYWGQGTLVTVSSGGGGSGGGGSGGGGSQTVVTQEPSLTVSPGGTVTLTCGSSTGAVTSGNYPNWVQQKPGQAPRGLIGGTKFLAPGTPARFSGSLLGGKAALTLSGVQPEDEAEYYCVLWYSNRWVFGCGTKLTVLGGGGSGGGGSGGGGSEVQLVESGGGLVQPGGSLKLSCAASGFTFNKYAMNWVRQAPGKCLEWVARIRSKYNNYATYYADSVKDRFTISRDDSKNTAYLQMNNLKTEDTAVYYCVRHGNFGNSYISYWAYWGQGTLVTVSSGGGGSGGGGSGGGGSQTVVTQEPSLTVSPGGTVTLTCGSSTGAVTSGNYPNWVQQKPGQAPRGLIGGTKFLAPGTPARFSGSLLGGKAALTLSGVQPEDEAEYYCVLWYSNRWVFGCGTKLTVL

SEQ ID NO: 343 - protein, 1513 aa, Synthetic construct
ELVMTQSPSSLTVTAGEKVTMSCKSSQSLLNSGNQKNYLTWYQQKPGQPPKLLIYWASTRESGVPDRFTGSGSGTDFTLTISSVQAEDLAVYYCQNDYSYPLTFGAGTKLEIKGGGGSGGGGSGGGGSEVQLLEQSGAELVRPGTSVKISCKASGYAFTNYWLGWVKQRPGHGLEWIGDIFPGSGNIHYNEKFKGKATLTADKSSSTAYMQLSSLTFEDSAVYFCARLRNWDEPMDYWGQGTTVTVSSGGGGSEVQLLESGGGVVQPGRSLRLSCAASGFTFSSYGMGWVRQAPGKGLEWVAVISYDGSNKYYADSVKGRFTISRDNSKNTLYLQMNSLRAEDTAVYYCAREGAHFGSGSYYPLYYYYAMDVWGQGTTVTVSSGGGGSGGGGSGGGGSELTLTQSPGTLSLSPGERATLSCRASQSVSSSYLAWYQQKPGQAPRLLIYGASIRATGIPDRFSGSGSGTDFTLTISRLEPEDFAVYYCQQYGSSPIFTFGPGTKVEIKSGGGGDKTHTCPPCPAPELLGGPSVFLFPPKPKDTLMISRTPEVTCVVVDVSHEDPEVKFNWYVDGVEVHNAKTKPCEEQYGSTYRCVSVLTVLHQDWLNGKEYKCKVSNKALPAPIEKTISKAKGQPREPQVYTLPPSREEMTKNQVSLTCLVKGFYPSDIAVEWESNGQPENNYKTTPPVLDSDGSFFLYSKLTVDKSRWQQGNVFSCSVMHEALHNHYTQKSLSLSPGKGGGGSGGGGSGGGGSGGGGSGGGGSGGGGSDKTHTCPPCPAPELLGGPSVFLFPPKPKDTLMISRTPEVTCVVVDVSHEDPEVKFNWYVDGVEVHNAKTKPCEEQYGSTYRCVSVLTVLHQDWLNGKEYKCKVSNKALPAPIEKTISKAKGQPREPQVYTLPPSREEMTKNQVSLTCLVKGFYPSDIAVEWESNGQPENNYKTTPPVLDSDGSFFLYSKLTVDKSRWQQGNVFSCSVMHEALHNHYTQKSLSLSPGKGGGGEVQLVESGGGLVQPGGSLKLSCAASGFTFNKYAMNWVRQAPGKCLEWVARIRSKYNNYATYYADSVKDRFTISRDDSKNTAYLQMNNLKTEDTAVYYCVRHGNFGNSYISYWAYWGQGTLVTVSSGGGGSGGGGSGGGGSQTVVTQEPSLTVSPGGTVTLTCGSSTGAVTSGNYPNWVQQKPGQAPRGLIGGTKFLAPGTPARFSGSLLGGKAALTLSGVQPEDEAEYYCVLWYSNRWVFGCGTKLTVLGGGGSGGGGSGGGGSEVQLVESGGGLVQPGGSLKLSCAASGFTFNKYAMNWVRQAPGKCLEWVARIRSKYNNYATYYADSVKDRFTISRDDSKNTAYLQMNNLKTEDTAVYYCVRHGNFGNSYISYWAYWGQGTLVTVSSGGGGSGGGGSGGGGSQTVVTQEPSLTVSPGGTVTLTCGSSTGAVTSGNYPNWVQQKPGQAPRGLIGGTKFLAPGTPARFSGSLLGGKAALTLSGVQPEDEAEYYCVLWYSNRWVFGCGTKLTVL

SEQ ID NO: 344 - protein, 1503 aa, Synthetic construct
ELVMTQSPSSLTVTAGEKVTMSCKSSQSLLNSGNQKNYLTWYQQKPGQPPKLLIYWASTRESGVPDRFTGSGSGTDFTLTISSVQAEDLAVYYCQNDYSYPLTFGAGTKLEIKGGGGSGGGGSGGGGSEVQLLEQSGAELVRPGTSVKISCKASGYAFTNYWLGWVKQRPGHGLEWIGDIFPGSGNIHYNEKFKGKATLTADKSSSTAYMQLSSLTFEDSAVYFCARLRNWDEPMDYWGQGTTVTVSSGGGGSEVQLLESGGGVVQPGRSLRLSCAASGFTFSSYGMGWVRQAPGKGLEWVAVISYDGSNKYYADSVKGRFTISRDNSKNTLYLQMNSLRAEDTAVYYCAREGAHFGSGSYYPLYYYYAMDVWGQGTTVTVSSGGGGSGGGGSGGGGSELTLTQSPGTLSLSPGERATLSCRASQSVSSSYLAWYQQKPGQAPRLLIYGASIRATGIPDRFSGSGSGTDFTLTISRLEPEDFAVYYCQQYGSSPIFTFGPGTKVEIKSGGGGSEVQLVESGGGLVQPGGSLKLSCAASGFTFNKYAMNWVRQAPGKCLEWVARIRSKYNNYATYYADSVKDRFTISRDDSKNTAYLQMNNLKTEDTAVYYCVRHGNFGNSYISYWAYWGQGTLVTVSSGGGGSGGGGSGGGGSQTVVTQEPSLTVSPGGTVTLTCGSSTGAVTSGNYPNWVQQKPGQAPRGLIGGTKFLAPGTPARFSGSLLGGKAALTLSGVQPEDEAEYYCVLWYSNRWVFGCGTKLTVLGGGGDKTHTCPPCPAPELLGGPSVFLFPPKPKDTLMISRTPEVTCVVVDVSHEDPEVKFNWYVDGVEVHNAKTKPCEEQYGSTYRCVSVLTVLHQDWLNGKEYKCKVSNKALPAPIEKTISKAKGQPREPQVYTLPPSREEMTKNQVSLTCLVKGFYPSDIAVEWESNGQPENNYKTTPPVLDSDGSFFLYSKLTVDKSRWQQGNVFSCSVMHEALHNHYTQKSLSLSPGKGGGGSGGGGSGGGGSGGGGSGGGGSGGGGSDKTHTCPPCPAPELLGGPSVFLFPPKPKDTLMISRTPEVTCVVVDVSHEDPEVKFNWYVDGVEVHNAKTKPCEEQYGSTYRCVSVLTVLHQDWLNGKEYKCKVSNKALPAPIEKTISKAKGQPREPQVYTLPPSREEMTKNQVSLTCLVKGFYPSDIAVEWESNGQPENNYKTTPPVLDSDGSFFLYSKLTVDKSRWQQGNVFSCSVMHEALHNHYTQKSLSLSPGKGGGGEVQLVESGGGLVQPGGSLKLSCAASGFTFNKYAMNWVRQAPGKCLEWVARIRSKYNNYATYYADSVKDRFTISRDDSKNTAYLQMNNLKTEDTAVYYCVRHGNFGNSYISYWAYWGQGTLVTVSSGGGGSGGGGSGGGGSQTVVTQEPSLTVSPGGTVTLTCGSSTGAVTSGNYPNWVQQKPGQAPRGLIGGTKFLAPGTPARFSGSLLGGKAALTLSGVQPEDEAEYYCVLWYSNRWVFGCGTKLTVL

SEQ ID NO: 345 - protein, 1514 aa, Synthetic construct
ELVMTQSPSSLTVTAGEKVTMSCKSSQSLLNSGNQKNYLTWYQQKPGQPPKLLIYWASTRESGVPDRFTGSGSGTDFTLTISSVQAEDLAVYYCQNDYSYPLTFGAGTKLEIKGGGGSGGGGSGGGGSEVQLLEQSGAELVRPGTSVKISCKASGYAFTNYWLGWVKQRPGHGLEWIGDIFPGSGNIHYNEKFKGKATLTADKSSSTAYMQLSSLTFEDSAVYFCARLRNWDEPMDYWGQGTTVTVSSGGGGSEVQLLESGGGVVQPGRSLRLSCAASGFTFSSYGMGWVRQAPGKGLEWVAVISYDGSNKYYADSVKGRFTISRDNSKNTLYLQMNSLRAEDTAVYYCAREGAHFGSGSYYPLYYYYAMDVWGQGTTVTVSSGGGGSGGGGSGGGGSELTLTQSPGTLSLSPGERATLSCRASQSVSSSYLAWYQQKPGQAPRLLIYGASIRATGIPDRFSGSGSGTDFTLTISRLEPEDFAVYYCQQYGSSPIFTFGPGTKVEIKSGGGGSEVQLVESGGGLVQPGGSLKLSCAASGFTFNKYAMNWVRQAPGKCLEWVARIRSKYNNYATYYADSVKDRFTISRDDSKNTAYLQMNNLKTEDTAVYYCVRHGNFGNSYISYWAYWGQGTLVTVSSGGGGSGGGGSGGGGSQTVVTQEPSLTVSPGGTVTLTCGSSTGAVTSGNYPNWVQQKPGQAPRGLIGGTKFLAPGTPARFSGSLLGGKAALTLSGVQPEDEAEYYCVLWYSNRWVFGCGTKLTVLGGGGSGGGGSGGGGSEVQLVESGGGLVQPGGSLKLSCAASGFTFNKYAMNWVRQAPGKCLEWVARIRSKYNNYATYYADSVKDRFTISRDDSKNTAYLQMNNLKTEDTAVYYCVRHGNFGNSYISYWAYWGQGTLVTVSSGGGGSGGGGSGGGGSQTVVTQEPSLTVSPGGTVTLTCGSSTGAVTSGNYPNWVQQKPGQAPRGLIGGTKFLAPGTPARFSGSLLGGKAALTLSGVQPEDEAEYYCVLWYSNRWVFGCGTKLTVLGGGGDKTHTCPPCPAPELLGGPSVFLFPPKPKDTLMISRTPEVTCVVVDVSHEDPEVKFNWYVDGVEVHNAKTKPCEEQYGSTYRCVSVLTVLHQDWLNGKEYKCKVSNKALPAPIEKTISKAKGQPREPQVYTLPPSREEMTKNQVSLTCLVKGFYPSDIAVEWESNGQPENNYKTTPPVLDSDGSFFLYSKLTVDKSRWQQGNVFSCSVMHEALHNHYTQKSLSLSPGKGGGGSGGGGSGGGGSGGGGSGGGGSGGGGSDKTHTCPPCPAPELLGGPSVFLFPPKPKDTLMISRTPEVTCVVVDVSHEDPEVKFNWYVDGVEVHNAKTKPCEEQYGSTYRCVSVLTVLHQDWLNGKEYKCKVSNKALPAPIEKTISKAKGQPREPQVYTLPPSREEMTKNQVSLTCLVKGFYPSDIAVEWESNGQPENNYKTTPPVLDSDGSFFLYSKLTVDKSRWQQGNVFSCSVMHEALHNHYTQKSLSLSPGK

SEQ ID NO: 346 - protein, 1524 aa, Synthetic construct
ELVMTQSPSSLTVTAGEKVTMSCKSSQSLLNSGNQKNYLTWYQQKPGQPPKLLIYWASTRESGVPDRFTGSGSGTDFTLTISSVQAEDLAVYYCQNDYSYPLTFGAGTKLEIKGGGGSGGGGSGGGGSEVQLLEQSGAELVRPGTSVKISCKASGYAFTNYWLGWVKQRPGHGLEWIGDIFPGSGNIHYNEKFKGKATLTADKSSSTAYMQLSSLTFEDSAVYFCARLRNWDEPMDYWGQGTTVTVSSGGGGSEVQLVESGGGLVQPGGSLKLSCAASGFTFNKYAMNWVRQAPGKGLEWVARIRSKYNNYATYYADSVKDRFTISRDDSKNTAYLQMNNLKTEDTAVYYCVRHGNFGNSYISYWAYWGQGTLVTVSSGGGGSGGGGSGGGGSQTVVTQEPSLTVSPGGTVTLTCGSSTGAVTSGNYPNWVQQKPGQAPRGLIGGTKFLAPGTPARFSGSLLGGKAALTLSGVQPEDEAEYYCVLWYSNRWVFGGGTKLTVLGGGGSGGGGSGGGGSDKTHTCPPCPAPELLGGPSVFLFPPKPKDTLMISRTPEVTCVVVDVSHEDPEVKFNWYVDGVEVHNAKTKPCEEQYGSTYRCVSVLTVLHQDWLNGKEYKCKVSNKALPAPIEKTISKAKGQPREPQVYTLPPSREEMTKNQVSLTCLVKGFYPSDIAVEWESNGQPENNYKTTPPVLDSDGSFFLYSKLTVDKSRWQQGNVFSCSVMHEALHNHYTQKSLSLSPGKGGGGSGGGGSGGGGSGGGGSGGGGSGGGGSDKTHTCPPCPAPELLGGPSVFLFPPKPKDTLMISRTPEVTCVVVDVSHEDPEVKFNWYVDGVEVHNAKTKPCEEQYGSTYRCVSVLTVLHQDWLNGKEYKCKVSNKALPAPIEKTISKAKGQPREPQVYTLPPSREEMTKNQVSLTCLVKGFYPSDIAVEWESNGQPENNYKTTPPVLDSDGSFFLYSKLTVDKSRWQQGNVFSCSVMHEALHNHYTQKSLSLSPGKGGGGSGGGGSGGGGSEVQLVESGGGLVQPGGSLKLSCAASGFTFNKYAMNWVRQAPGKGLEWVARIRSKYNNYATYYADSVKDRFTISRDDSKNTAYLQMNNLKTEDTAVYYCVRHGNFGNSYISYWAYWGQGTLVTVSSGGGGSGGGGSGGGGSQTVVTQEPSLTVSPGGTVTLTCGSSTGAVTSGNYPNWVQQKPGQAPRGLIGGTKFLAPGTPARFSGSLLGGKAALTLSGVQPEDEAEYYCVLWYSNRWVFGGGTKLTVLGGGGSEVQLLESGGGVVQPGRSLRLSCAASGFTFSSYGMGWVRQAPGKGLEWVAVISYDGSNKYYADSVKGRFTISRDNSKNTLYLQMNSLRAEDTAVYYCAREGAHFGSGSYYPLYYYYAMDVWGQGTTVTVSSGGGGSGGGGSGGGGSELTLTQSPGTLSLSPGERATLSCRASQSVSSSYLAWYQQKPGQAPRLLIYGASIRATGIPDRFSGSGSGTDFTLTISRLEPEDFAVYYCQQYGSSPIFTFGPGTKVEIK

SEQ ID NO: 347 - protein, 1016 aa, Synthetic construct
ELVMTQSPSSLTVTAGEKVTMSCKSSQSLLNSGNQKNYLTWYQQKPGQPPKLLIYWASTRESGVPDRFTGSGSGTDFTLTISSVQAEDLAVYYCQNDYSYPLTFGAGTKLEIKGGGGSGGGGSGGGGSEVQLLEQSGAELVRPGTSVKISCKASGYAFTNYWLGWVKQRPGHGLEWIGDIFPGSGNIHYNEKFKGKATLTADKSSSTAYMQLSSLTFEDSAVYFCARLRNWDEPMDYWGQGTTVTVSSGGGGSEVQLVESGGGLVQPGGSLKLSCAASGFTFNKYAMNWVRQAPGKCLEWVARIRSKYNNYATYYADSVKDRFTISRDDSKNTAYLQMNNLKTEDTAVYYCVRHGNFGNSYISYWAYWGQGTLVTVSSGGGGSGGGGSGGGGSQTVVTQEPSLTVSPGGTVTLTCGSSTGAVTSGNYPNWVQQKPGQAPRGLIGGTKFLAPGTPARFSGSLLGGKAALTLSGVQPEDEAEYYCVLWYSNRWVFGCGTKLTVLGGGGSEVQLLESGGGVVQPGRSLRLSCAASGFTFSSYGMGWVRQAPGKGLEWVAVISYDGSNKYYADSVKGRFTISRDNSKNTLYLQMNSLRAEDTAVYYCAREGAHFGSGSYYPLYYYYAMDVWGQGTTVTVSSGGGGSGGGGSGGGGSELTLTQSPGTLSLSPGERATLSCRASQSVSSSYLAWYQQKPGQAPRLLIYGASIRATGIPDRFSGSGSGTDFTLTISRLEPEDFAVYYCQQYGSSPIFTFGPGTKVEIKSGGGGSEVQLVESGGGLVQPGGSLKLSCAASGFTFNKYAMNWVRQAPGKCLEWVARIRSKYNNYATYYADSVKDRFTISRDDSKNTAYLQMNNLKTEDTAVYYCVRHGNFGNSYISYWAYWGQGTLVTVSSGGGGSGGGGSGGGGSQTVVTQEPSLTVSPGGTVTLTCGSSTGAVTSGNYPNWVQQKPGQAPRGLIGGTKFLAPGTPARFSGSLLGGKAALTLSGVQPEDEAEYYCVLWYSNRWVFGCGTKLTVL

SEQ ID NO: 348 - protein, 1525 aa, Synthetic construct
ELVMTQSPSSLTVTAGEKVTMSCKSSQSLLNSGNQKNYLTWYQQKPGQPPKLLIYWASTRESGVPDRFTGSGSGTDFTLTISSVQAEDLAVYYCQNDYSYPLTFGAGTKLEIKGGGGSGGGGSGGGGSEVQLLEQSGAELVRPGTSVKISCKASGYAFTNYWLGWVKQRPGHGLEWIGDIFPGSGNIHYNEKFKGKATLTADKSSSTAYMQLSSLTFEDSAVYFCARLRNWDEPMDYWGQGTTVTVSSGGGGSEVQLVESGGGLVQPGGSLKLSCAASGFTFNKYAMNWVRQAPGKCLEWVARIRSKYNNYATYYADSVKDRFTISRDDSKNTAYLQMNNLKTEDTAVYYCVRHGNFGNSYISYWAYWGQGTLVTVSSGGGGSGGGGSGGGGSQTVVTQEPSLTVSPGGTVTLTCGSSTGAVTSGNYPNWVQQKPGQAPRGLIGGTKFLAPGTPARFSGSLLGGKAALTLSGVQPEDEAEYYCVLWYSNRWVFGCGTKLTVLGGGGSGGGGSGGGGSDKTHTCPPCPAPELLGGPSVFLFPPKPKDTLMISRTPEVTCVVVDVSHEDPEVKFNWYVDGVEVHNAKTKPCEEQYGSTYRCVSVLTVLHQDWLNGKEYKCKVSNKALPAPIEKTISKAKGQPREPQVYTLPPSREEMTKNQVSLTCLVKGFYPSDIAVEWESNGQPENNYKTTPPVLDSDGSFFLYSKLTVDKSRWQQGNVFSCSVMHEALHNHYTQKSLSLSPGKGGGGSGGGGSGGGGSGGGGSGGGGSGGGGSDKTHTCPPCPAPELLGGPSVFLFPPKPKDTLMISRTPEVTCVVVDVSHEDPEVKFNWYVDGVEVHNAKTKPCEEQYGSTYRCVSVLTVLHQDWLNGKEYKCKVSNKALPAPIEKTISKAKGQPREPQVYTLPPSREEMTKNQVSLTCLVKGFYPSDIAVEWESNGQPENNYKTTPPVLDSDGSFFLYSKLTVDKSRWQQGNVFSCSVMHEALHNHYTQKSLSLSPGKGGGGSGGGGSGGGGSEVQLLESGGGVVQPGRSLRLSCAASGFTFSSYGMGWVRQAPGKGLEWVAVISYDGSNKYYADSVKGRFTISRDNSKNTLYLQMNSLRAEDTAVYYCAREGAHFGSGSYYPLYYYYAMDVWGQGTTVTVSSGGGGSGGGGSGGGGSELTLTQSPGTLSLSPGERATLSCRASQSVSSSYLAWYQQKPGQAPRLLIYGASIRATGIPDRFSGSGSGTDFTLTISRLEPEDFAVYYCQQYGSSPIFTFGPGTKVEIKSGGGGSEVQLVESGGGLVQPGGSLKLSCAASGFTFNKYAMNWVRQAPGKCLEWVARIRSKYNNYATYYADSVKDRFTISRDDSKNTAYLQMNNLKTEDTAVYYCVRHGNFGNSYISYWAYWGQGTLVTVSSGGGGSGGGGSGGGGSQTVVTQEPSLTVSPGGTVTLTCGSSTGAVTSGNYPNWVQQKPGQAPRGLIGGTKFLAPGTPARFSGSLLGGKAALTLSGVQPEDEAEYYCVLWYSNRWVFGCGTKLTVL

SEQ ID NO: 349 - protein, 1524 aa, Synthetic construct
ELVMTQSPSSLTVTAGEKVTMSCKSSQSLLNSGNQKNYLTWYQQKPGQPPKLLIYWASTRESGVPDRFTGSGSGTDFTLTISSVQAEDLAVYYCQNDYSYPLTFGAGTKLEIKGGGGSGGGGSGGGGSEVQLLEQSGAELVRPGTSVKISCKASGYAFTNYWLGWVKQRPGHGLEWIGDIFPGSGNIHYNEKFKGKATLTADKSSSTAYMQLSSLTFEDSAVYFCARLRNWDEPMDYWGQGTTVTVSSGGGGSEVQLVESGGGLVQPGGSLKLSCAASGFTFNKYAMNWVRQAPGKCLEWVARIRSKYNNYATYYADSVKDRFTISRDDSKNTAYLQMNNLKTEDTAVYYCVRHGNFGNSYISYWAYWGQGTLVTVSSGGGGSGGGGSGGGGSQTVVTQEPSLTVSPGGTVTLTCGSSTGAVTSGNYPNWVQQKPGQAPRGLIGGTKFLAPGTPARFSGSLLGGKAALTLSGVQPEDEAEYYCVLWYSNRWVFGCGTKLTVLGGGGSGGGGSGGGGSDKTHTCPPCPAPELLGGPSVFLFPPKPKDTLMISRTPEVTCVVVDVSHEDPEVKFNWYVDGVEVHNAKTKPCEEQYGSTYRCVSVLTVLHQDWLNGKEYKCKVSNKALPAPIEKTISKAKGQPREPQVYTLPPSREEMTKNQVSLTCLVKGFYPSDIAVEWESNGQPENNYKTTPPVLDSDGSFFLYSKLTVDKSRWQQGNVFSCSVMHEALHNHYTQKSLSLSPGKGGGGSGGGGSGGGGSGGGGSGGGGSGGGGSDKTHTCPPCPAPELLGGPSVFLFPPKPKDTLMISRTPEVTCVVVDVSHEDPEVKFNWYVDGVEVHNAKTKPCEEQYGSTYRCVSVLTVLHQDWLNGKEYKCKVSNKALPAPIEKTISKAKGQPREPQVYTLPPSREEMTKNQVSLTCLVKGFYPSDIAVEWESNGQPENNYKTTPPVLDSDGSFFLYSKLTVDKSRWQQGNVFSCSVMHEALHNHYTQKSLSLSPGKGGGGSGGGGSGGGGSEVQLVESGGGLVQPGGSLKLSCAASGFTFNKYAMNWVRQAPGKCLEWVARIRSKYNNYATYYADSVKDRFTISRDDSKNTAYLQMNNLKTEDTAVYYCVRHGNFGNSYISYWAYWGQGTLVTVSSGGGGSGGGGSGGGGSQTVVTQEPSLTVSPGGTVTLTCGSSTGAVTSGNYPNWVQQKPGQAPRGLIGGTKFLAPGTPARFSGSLLGGKAALTLSGVQPEDEAEYYCVLWYSNRWVFGCGTKLTVLGGGGSEVQLLESGGGVVQPGRSLRLSCAASGFTFSSYGMGWVRQAPGKGLEWVAVISYDGSNKYYADSVKGRFTISRDNSKNTLYLQMNSLRAEDTAVYYCAREGAHFGSGSYYPLYYYYAMDVWGQGTTVTVSSGGGGSGGGGSGGGGSELTLTQSPGTLSLSPGERATLSCRASQSVSSSYLAWYQQKPGQAPRLLIYGASIRATGIPDRFSGSGSGTDFTLTISRLEPEDFAVYYCQQYGSSPIFTFGPGTKVEIK

SEQ ID NO: 350 - protein, 1061 aa, Synthetic construct
ELVMTQSPSSLTVTAGEKVTMSCKSSQSLLNSGNQKNYLTWYQQKPGQPPKLLIYWASTRESGVPDRFTGSGSGTDFTLTISSVQAEDLAVYYCQNDYSYPLTFGAGTKLEIKGGGGSGGGGSGGGGSEVQLLEQSGAELVRPGTSVKISCKASGYAFTNYWLGWVKQRPGHGLEWIGDIFPGSGNIHYNEKFKGKATLTADKSSSTAYMQLSSLTFEDSAVYFCARLRNWDEPMDYWGQGTTVTVSSGGGGSEVQLVESGGGLVQPGGSLKLSCAASGFTFNKYAMNWVRQAPGKCLEWVARIRSKYNNYATYYADSVKDRFTISRDDSKNTAYLQMNNLKTEDTAVYYCVRHGNFGNSYISYWAYWGQGTLVTVSSGGGGSGGGGSGGGGSQTVVTQEPSLTVSPGGTVTLTCGSSTGAVTSGNYPNWVQQKPGQAPRGLIGGTKFLAPGTPARFSGSLLGGKAALTLSGVQPEDEAEYYCVLWYSNRWVFGCGTKLTVLGGGGSGGGGSGGGGSGGGGSGGGGSGGGGSGGGGSGGGGSGGGGSGGGGSEVQLLESGGGVVQPGRSLRLSCAASGFTFSSYGMGWVRQAPGKGLEWVAVISYDGSNKYYADSVKGRFTISRDNSKNTLYLQMNSLRAEDTAVYYCAREGAHFGSGSYYPLYYYYAMDVWGQGTTVTVSSGGGGSGGGGSGGGGSELTLTQSPGTLSLSPGERATLSCRASQSVSSSYLAWYQQKPGQAPRLLIYGASIRATGIPDRFSGSGSGTDFTLTISRLEPEDFAVYYCQQYGSSPIFTFGPGTKVEIKSGGGGSEVQLVESGGGLVQPGGSLKLSCAASGFTFNKYAMNWVRQAPGKCLEWVARIRSKYNNYATYYADSVKDRFTISRDDSKNTAYLQMNNLKTEDTAVYYCVRHGNFGNSYISYWAYWGQGTLVTVSSGGGGSGGGGSGGGGSQTVVTQEPSLTVSPGGTVTLTCGSSTGAVTSGNYPNWVQQKPGQAPRGLIGGTKFLAPGTPARFSGSLLGGKAALTLSGVQPEDEAEYYCVLWYSNRWVFGCGTKLTVL

SEQ ID NO: 351 - protein, 1164 aa, Synthetic construct
ELVMTQSPSSLTVTAGEKVTMSCKSSQSLLNSGNQKNYLTWYQQKPGQPPKLLIYWASTRESGVPDRFTGSGSGTDFTLTISSVQAEDLAVYYCQNDYSYPLTFGAGTKLEIKGGGGSGGGGSGGGGSEVQLLEQSGAELVRPGTSVKISCKASGYAFTNYWLGWVKQRPGHGLEWIGDIFPGSGNIHYNEKFKGKATLTADKSSSTAYMQLSSLTFEDSAVYFCARLRNWDEPMDYWGQGTTVTVSSGGGGSEVQLVESGGGLVQPGGSLKLSCAASGFTFNKYAMNWVRQAPGKCLEWVARIRSKYNNYATYYADSVKDRFTISRDDSKNTAYLQMNNLKTEDTAVYYCVRHGNFGNSYISYWAYWGQGTLVTVSSGGGGSGGGGSGGGGSQTVVTQEPSLTVSPGGTVTLTCGSSTGAVTSGNYPNWVQQKPGQAPRGLIGGTKFLAPGTPARFSGSLLGGKAALTLSGVQPEDEAEYYCVLWYSNRWVFGCGTKLTVLGGGGSLDSPDRPWNPPTFSPALLVVTEGDNATFTCSFSNTSESFVLNWYRMSPSNQTDKLAAFPEDRSQPGQDCRFRVTQLPNGRDFHMSVVRARRNDSGTYLCGAISLAPKAQIKESLRAELRVTERRAEVPTAHPSPSPRPAGQFQGGGGSEVQLLESGGGVVQPGRSLRLSCAASGFTFSSYGMGWVRQAPGKGLEWVAVISYDGSNKYYADSVKGRFTISRDNSKNTLYLQMNSLRAEDTAVYYCAREGAHFGSGSYYPLYYYYAMDVWGQGTTVTVSSGGGGSGGGGSGGGGSELTLTQSPGTLSLSPGERATLSCRASQSVSSSYLAWYQQKPGQAPRLLIYGASIRATGIPDRFSGSGSGTDFTLTISRLEPEDFAVYYCQQYGSSPIFTFGPGTKVEIKSGGGGSEVQLVESGGGLVQPGGSLKLSCAASGFTFNKYAMNWVRQAPGKCLEWVARIRSKYNNYATYYADSVKDRFTISRDDSKNTAYLQMNNLKTEDTAVYYCVRHGNFGNSYISYWAYWGQGTLVTVSSGGGGSGGGGSGGGGSQTVVTQEPSLTVSPGGTVTLTCGSSTGAVTSGNYPNWVQQKPGQAPRGLIGGTKFLAPGTPARFSGSLLGGKAALTLSGVQPEDEAEYYCVLWYSNRWVFGCGTKLTVL

SEQ ID NO: 352 - protein, 1595 aa, Synthetic construct
ELVMTQSPSSLTVTAGEKVTMSCKSSQSLLNSGNQKNYLTWYQQKPGQPPKLLIYWASTRESGVPDRFTGSGSGTDFTLTISSVQAEDLAVYYCQNDYSYPLTFGAGTKLEIKGGGGSGGGGSGGGGSEVQLLEQSGAELVRPGTSVKISCKASGYAFTNYWLGWVKQRPGHGLEWIGDIFPGSGNIHYNEKFKGKATLTADKSSSTAYMQLSSLTFEDSAVYFCARLRNWDEPMDYWGQGTTVTVSSGEAAAKEAAAKEAAAKEAAAKEAAAKEAAAKEAAAKEAAAKEAAAKEAAAKEVQLVESGGGLVQPGGSLKLSCAASGFTFNKYAMNWVRQAPGKCLEWVARIRSKYNNYATYYADSVKDRFTISRDDSKNTAYLQMNNLKTEDTAVYYCVRHGNFGNSYISYWAYWGQGTLVTVSSGGGGSGGGGSGGGGSQTVVTQEPSLTVSPGGTVTLTCGSSTGAVTSGNYPNWVQQKPGQAPRGLIGGTKFLAPGTPARFSGSLLGGKAALTLSGVQPEDEAEYYCVLWYSNRWVFGCGTKLTVLGGGGDKTHTCPPCPAPELLGGPSVFLFPPKPKDTLMISRTPEVTCVVVDVSHEDPEVKFNWYVDGVEVHNAKTKPCEEQYGSTYRCVSVLTVLHQDWLNGKEYKCKVSNKALPAPIEKTISKAKGQPREPQVYTLPPSREEMTKNQVSLTCLVKGFYPSDIAVEWESNGQPENNYKTTPPVLDSDGSFFLYSKLTVDKSRWQQGNVFSCSVMHEALHNHYTQKSLSLSPGKGGGGSGGGGSGGGGSGGGGSGGGGSGGGGSDKTHTCPPCPAPELLGGPSVFLFPPKPKDTLMISRTPEVTCVVVDVSHEDPEVKFNWYVDGVEVHNAKTKPCEEQYGSTYRCVSVLTVLHQDWLNGKEYKCKVSNKALPAPIEKTISKAKGQPREPQVYTLPPSREEMTKNQVSLTCLVKGFYPSDIAVEWESNGQPENNYKTTPPVLDSDGSFFLYSKLTVDKSRWQQGNVFSCSVMHEALHNHYTQKSLSLSPGKGGGGEVQLLESGGGVVQPGRSLRLSCAASGFTFSSYGMGWVRQAPGKGLEWVAVISYDGSNKYYADSVKGRFTISRDNSKNTLYLQMNSLRAEDTAVYYCAREGAHFGSGSYYPLYYYYAMDVWGQGTTVTVSSGGGGSGGGGSGGGGSELTLTQSPGTLSLSPGERATLSCRASQSVSSSYLAWYQQKPGQAPRLLIYGASIRATGIPDRFSGSGSGTDFTLTISRLEPEDFAVYYCQQYGSSPIFTFGPGTKVEIKSGEAAAKEAAAKEAAAKEAAAKEAAAKEAAAKEAAAKEAAAKEAAAKEAAAKEVQLVESGGGLVQPGGSLKLSCAASGFTFNKYAMNWVRQAPGKCLEWVARIRSKYNNYATYYADSVKDRFTISRDDSKNTAYLQMNNLKTEDTAVYYCVRHGNFGNSYISYWAYWGQGTLVTVSSGGGGSGGGGSGGGGSQTVVTQEPSLTVSPGGTVTLTCGSSTGAVTSGNYPNWVQQKPGQAPRGLIGGTKFLAPGTPARFSGSLLGGKAALTLSGVQPEDEAEYYCVLWYSNRWVFGCGTKLTVL

SEQ ID NO: 353 - protein, 1523 aa, Synthetic construct
ELVMTQSPSSLTVTAGEKVTMSCKSSQSLLNSGNQKNYLTWYQQKPGQPPKLLIYWASTRESGVPDRFTGSGSGTDFTLTISSVQAEDLAVYYCQNDYSYPLTFGAGTKLEIKGGGGSGGGGSGGGGSEVQLLEQSGAELVRPGTSVKISCKASGYAFTNYWLGWVKQRPGHGLEWIGDIFPGSGNIHYNEKFKGKATLTADKSSSTAYMQLSSLTFEDSAVYFCARLRNWDEPMDYWGQGTTVTVSSGGGGSGGGGSGGGGSEVQLVESGGGLVQPGGSLKLSCAASGFTFNKYAMNWVRQAPGKCLEWVARIRSKYNNYATYYADSVKDRFTISRDDSKNTAYLQMNNLKTEDTAVYYCVRHGNFGNSYISYWAYWGQGTLVTVSSGGGGSGGGGSGGGGSQTVVTQEPSLTVSPGGTVTLTCGSSTGAVTSGNYPNWVQQKPGQAPRGLIGGTKFLAPGTPARFSGSLLGGKAALTLSGVQPEDEAEYYCVLWYSNRWVFGCGTKLTVLGGGGDKTHTCPPCPAPELLGGPSVFLFPPKPKDTLMISRTPEVTCVVVDVSHEDPEVKFNWYVDGVEVHNAKTKPCEEQYGSTYRCVSVLTVLHQDWLNGKEYKCKVSNKALPAPIEKTISKAKGQPREPQVYTLPPSREEMTKNQVSLTCLVKGFYPSDIAVEWESNGQPENNYKTTPPVLDSDGSFFLYSKLTVDKSRWQQGNVFSCSVMHEALHNHYTQKSLSLSPGKGGGGSGGGGSGGGGSGGGGSGGGGSGGGGSDKTHTCPPCPAPELLGGPSVFLFPPKPKDTLMISRTPEVTCVVVDVSHEDPEVKFNWYVDGVEVHNAKTKPCEEQYGSTYRCVSVLTVLHQDWLNGKEYKCKVSNKALPAPIEKTISKAKGQPREPQVYTLPPSREEMTKNQVSLTCLVKGFYPSDIAVEWESNGQPENNYKTTPPVLDSDGSFFLYSKLTVDKSRWQQGNVFSCSVMHEALHNHYTQKSLSLSPGKGGGGEVQLLESGGGVVQPGRSLRLSCAASGFTFSSYGMGWVRQAPGKGLEWVAVISYDGSNKYYADSVKGRFTISRDNSKNTLYLQMNSLRAEDTAVYYCAREGAHFGSGSYYPLYYYYAMDVWGQGTTVTVSSGGGGSGGGGSGGGGSELTLTQSPGTLSLSPGERATLSCRASQSVSSSYLAWYQQKPGQAPRLLIYGASIRATGIPDRFSGSGSGTDFTLTISRLEPEDFAVYYCQQYGSSPIFTFGPGTKVEIKSGGGGSGGGGSGGGGSEVQLVESGGGLVQPGGSLKLSCAASGFTFNKYAMNWVRQAPGKCLEWVARIRSKYNNYATYYADSVKDRFTISRDDSKNTAYLQMNNLKTEDTAVYYCVRHGNFGNSYISYWAYWGQGTLVTVSSGGGGSGGGGSGGGGSQTVVTQEPSLTVSPGGTVTLTCGSSTGAVTSGNYPNWVQQKPGQAPRGLIGGTKFLAPGTPARFSGSLLGGKAALTLSGVQPEDEAEYYCVLWYSNRWVFGCGTKLTVL

SEQ ID NO: 354 - protein, 1495 aa, Synthetic construct
ELVMTQSPSSLTVTAGEKVTMSCKSSQSLLNSGNQKNYLTWYQQKPGQPPKLLIYWASTRESGVPDRFTGSGSGTDFTLTISSVQAEDLAVYYCQNDYSYPLTFGAGTKLEIKGGGGSGGGGSGGGGSEVQLLEQSGAELVRPGTSVKISCKASGYAFTNYWLGWVKQRPGHGLEWIGDIFPGSGNIHYNEKFKGKATLTADKSSSTAYMQLSSLTFEDSAVYFCARLRNWDEPMDYWGQGTTVTVSSGGGGSEVQLVESGGGLVQPGGSLKLSCAASGFTFNKYAMNWVRQAPGKCLEWVARIRSKYNNYATYYADSVKDRFTISRDDSKNTAYLQMNNLKTEDTAVYYCVRHGNFGNSYISYWAYWGQGTLVTVSSGGGGSGGGGSGGGGSQTVVTQEPSLTVSPGGTVTLTCGSSTGAVTSGNYPNWVQQKPGQAPRGLIGGTKFLAPGTPARFSGSLLGGKAALTLSGVQPEDEAEYYCVLWYSNRWVFGCGTKLTVLDKTHTCPPCPAPELLGGPSVFLFPPKPKDTLMISRTPEVTCVVVDVSHEDPEVKFNWYVDGVEVHNAKTKPCEEQYGSTYRCVSVLTVLHQDWLNGKEYKCKVSNKALPAPIEKTISKAKGQPREPQVYTLPPSREEMTKNQVSLTCLVKGFYPSDIAVEWESNGQPENNYKTTPPVLDSDGSFFLYSKLTVDKSRWQQGNVFSCSVMHEALHNHYTQKSLSLSPGKGGGGSGGGGSGGGGSGGGGSGGGGSGGGGSDKTHTCPPCPAPELLGGPSVFLFPPKPKDTLMISRTPEVTCVVVDVSHEDPEVKFNWYVDGVEVHNAKTKPCEEQYGSTYRCVSVLTVLHQDWLNGKEYKCKVSNKALPAPIEKTISKAKGQPREPQVYTLPPSREEMTKNQVSLTCLVKGFYPSDIAVEWESNGQPENNYKTTPPVLDSDGSFFLYSKLTVDKSRWQQGNVFSCSVMHEALHNHYTQKSLSLSPGKEVQLLESGGGVVQPGRSLRLSCAASGFTFSSYGMGWVRQAPGKGLEWVAVISYDGSNKYYADSVKGRFTISRDNSKNTLYLQMNSLRAEDTAVYYCAREGAHFGSGSYYPLYYYYAMDVWGQGTTVTVSSGGGGSGGGGSGGGGSELTLTQSPGTLSLSPGERATLSCRASQSVSSSYLAWYQQKPGQAPRLLIYGASIRATGIPDRFSGSGSGTDFTLTISRLEPEDFAVYYCQQYGSSPIFTFGPGTKVEIKSGGGGSEVQLVESGGGLVQPGGSLKLSCAASGFTFNKYAMNWVRQAPGKCLEWVARIRSKYNNYATYYADSVKDRFTISRDDSKNTAYLQMNNLKTEDTAVYYCVRHGNFGNSYISYWAYWGQGTLVTVSSGGGGSGGGGSGGGGSQTVVTQEPSLTVSPGGTVTLTCGSSTGAVTSGNYPNWVQQKPGQAPRGLIGGTKFLAPGTPARFSGSLLGGKAALTLSGVQPEDEAEYYCVLWYSNRWVFGCGTKLTVL

SEQ ID NO: 355 - protein, 1588 aa, Synthetic construct
ELVMTQSPSSLTVTAGEKVTMSCKSSQSLLNSGNQKNYLTWYQQKPGQPPKLLIYWASTRESGVPDRFTGSGSGTDFTLTISSVQAEDLAVYYCQNDYSYPLTFGAGTKLEIKGGGGSGGGGSGGGGSEVQLLEQSGAELVRPGTSVKISCKASGYAFTNYWLGWVKQRPGHGLEWIGDIFPGSGNIHYNEKFKGKATLTADKSSSTAYMQLSSLTFEDSAVYFCARLRNWDEPMDYWGQGTTVTVSSGGGGSGGGGSGGGGSGGGGSGGGGSGGGGSGGGGSGGGGSGGGGSGGGGSEVQLVESGGGLVQPGGSLKLSCAASGFTFNKYAMNWVRQAPGKCLEWVARIRSKYNNYATYYADSVKDRFTISRDDSKNTAYLQMNNLKTEDTAVYYCVRHGNFGNSYISYWAYWGQGTLVTVSSGGGGSGGGGSGGGGSQTVVTQEPSLTVSPGGTVTLTCGSSTGAVTSGNYPNWVQQKPGQAPRGLIGGTKFLAPGTPARFSGSLLGGKAALTLSGVQPEDEAEYYCVLWYSNRWVFGCGTKLTVLGGGGDKTHTCPPCPAPELLGGPSVFLFPPKPKDTLMISRTPEVTCVVVDVSHEDPEVKFNWYVDGVEVHNAKTKPCEEQYGSTYRCVSVLTVLHQDWLNGKEYKCKVSNKALPAPIEKTISKAKGQPREPQVYTLPPSREEMTKNQVSLTCLVKGFYPSDIAVEWESNGQPENNYKTTPPVLDSDGSFFLYSKLTVDKSRWQQGNVFSCSVMHEALHNHYTQKSLSLSPGKGGGGSGGGGSGGGGSGGGGSGGGGSGGGGSDKTHTCPPCPAPELLGGPSVFLFPPKPKDTLMISRTPEVTCVVVDVSHEDPEVKFNWYVDGVEVHNAKTKPCEEQYGSTYRCVSVLTVLHQDWLNGKEYKCKVSNKALPAPIEKTISKAKGQPREPQVYTLPPSREEMTKNQVSLTCLVKGFYPSDIAVEWESNGQPENNYKTTPPVLDSDGSFFLYSKLTVDKSRWQQGNVFSCSVMHEALHNHYTQKSLSLSPGKGGGGEVQLVESGGGLVQPGGSLKLSCAASGFTFNKYAMNWVRQAPGKCLEWVARIRSKYNNYATYYADSVKDRFTISRDDSKNTAYLQMNNLKTEDTAVYYCVRHGNFGNSYISYWAYWGQGTLVTVSSGGGGSGGGGSGGGGSQTVVTQEPSLTVSPGGTVTLTCGSSTGAVTSGNYPNWVQQKPGQAPRGLIGGTKFLAPGTPARFSGSLLGGKAALTLSGVQPEDEAEYYCVLWYSNRWVFGCGTKLTVLSGGGGSGGGGSGGGGSGGGGSGGGGSGGGGSGGGGSGGGGSGGGGSEVQLLESGGGVVQPGRSLRLSCAASGFTFSSYGMGWVRQAPGKGLEWVAVISYDGSNKYYADSVKGRFTISRDNSKNTLYLQMNSLRAEDTAVYYCAREGAHFGSGSYYPLYYYYAMDVWGQGTTVTVSSGGGGSGGGGSGGGGSELTLTQSPGTLSLSPGERATLSCRASQSVSSSYLAWYQQKPGQAPRLLIYGASIRATGIPDRFSGSGSGTDFTLTISRLEPEDFAVYYCQQYGSSPIFTFGPGTKVEIK

SEQ ID NO: 356 - protein, 5 aa, Synthetic construct
SYWMH

SEQ ID NO: 357 - protein, 17 aa, Synthetic construct
YITPSTGYTEYNQKFKG

SEQ ID NO: 358 - protein, 10 aa, Synthetic construct
VHDYDRAMEY

SEQ ID NO: 359 - protein, 11 aa, Synthetic construct
KASQDINKYIA

SEQ ID NO: 360 - protein, 7 aa, Synthetic construct
YTSTLQP

SEQ ID NO: 361 - protein, 9 aa, Synthetic construct
LQYASYPFT

SEQ ID NO: 362 - protein, 119 aa, Synthetic construct
QVQLVQSGAEVKKPGASVKVSCKASGYTFTSYWMHWVRQAPGQCLEWIGYITPSTGYTEYNQKFKGRVTMTRDKSTSTVYMELSSLTSEDTAVYYCARVHDYDRAMEYWGQGTTVTVSS

SEQ ID NO: 363 - protein, 107 aa, Synthetic construct
DIQMTQSPSSLSASVGDRVTITCKASQDINKYIAWYQQKPGKGPKLLIYYTSTLQPGVPSRFSGSGSGTDFTFTISSLQPEDIATYYCLQYASYPFTFGCGTRLEIK

SEQ ID NO: 364 - protein, 107 aa, Synthetic construct
EIQMTQSPSSLSASVGDRVTITCKASQDINKYIAWYQQKPGKGPKLLIYYTSTLQPGVPSRFSGSGSGTDFTFTISSLQPEDIATYYCLQYASYPFTFGCGTRLEIK

SEQ ID NO: 365 - protein, 5 aa, Synthetic construct
SYGIS

SEQ ID NO: 366 - protein, 17 aa, Synthetic construct
WISAYSGNAIYAQKLQG

SEQ ID NO: 367 - protein, 13 aa, Synthetic construct
DPDYYGSGSYSDY

SEQ ID NO: 368 - protein, 11 aa, Synthetic construct
RASQSVSSNLA

SEQ ID NO: 369 - protein, 7 aa, Synthetic construct
GASSRAT

SEQ ID NO: 370 - protein, 10 aa, Synthetic construct
QQYHSWPLLT

SEQ ID NO: 371 - protein, 122 aa, Synthetic construct
QVQLVQSGAEVKKPGASVKVSCKASGYTFTSYGISWVRQAPGQCLEWMGWISAYSGNAIYAQKLQGRVTMTRDTSTSTAYMELRSLRSDDTAVYYCARDPDYYGSGSYSDYWGQGTLVTVSS

SEQ ID NO: 372 - protein, 108 aa, Synthetic construct
EIVLTQSPATLSVSPGERATLSCRASQSVSSNLAWYQQKPGQAPRLLIYGASSRATGIPARFSGSGSGTEFTLTISSLQSEDFAVYYCQQYHSWPLLTFGCGTKVEIK

SEQ ID NO: 373 - protein, 1510 aa, Synthetic construct
QVQLVQSGAEVKKPGASVKVSCKASGYTFTSYGISWVRQAPGQCLEWMGWISAYSGNAIYAQKLQGRVTMTRDTSTSTAYMELRSLRSDDTAVYYCARDPDYYGSGSYSDYWGQGTLVTVSSGGGGSGGGGSGGGGSEIVLTQSPATLSVSPGERATLSCRASQSVSSNLAWYQQKPGQAPRLLIYGASSRATGIPARFSGSGSGTEFTLTISSLQSEDFAVYYCQQYHSWPLLTFGCGTKVEIKSGGGGSEVQLVESGGGLVQPGGSLKLSCAASGFTFNKYAMNWVRQAPGKGLEWVARIRSKYNNYATYYADSVKDRFTISRDDSKNTAYLQMNNLKTEDTAVYYCVRHGNFGNSYISYWAYWGQGTLVTVSSGGGGSGGGGSGGGGSQTVVTQEPSLTVSPGGTVTLTCGSSTGAVTSGNYPNWVQQKPGQAPRGLIGGTKFLAPGTPARFSGSLLGGKAALTLSGVQPEDEAEYYCVLWYSNRWVFGGGTKLTVLGGGGSGGGGSGGGGSDKTHTCPPCPAPELLGGPSVFLFPPKPKDTLMISRTPEVTCVVVDVSHEDPEVKFNWYVDGVEVHNAKTKPCEEQYGSTYRCVSVLTVLHQDWLNGKEYKCKVSNKALPAPIEKTISKAKGQPREPQVYTLPPSREEMTKNQVSLTCLVKGFYPSDIAVEWESNGQPENNYKTTPPVLDSDGSFFLYSKLTVDKSRWQQGNVFSCSVMHEALHNHYTQKSLSLSPGKGGGGSGGGGSGGGGSGGGGSGGGGSGGGGSDKTHTCPPCPAPELLGGPSVFLFPPKPKDTLMISRTPEVTCVVVDVSHEDPEVKFNWYVDGVEVHNAKTKPCEEQYGSTYRCVSVLTVLHQDWLNGKEYKCKVSNKALPAPIEKTISKAKGQPREPQVYTLPPSREEMTKNQVSLTCLVKGFYPSDIAVEWESNGQPENNYKTTPPVLDSDGSFFLYSKLTVDKSRWQQGNVFSCSVMHEALHNHYTQKSLSLSPGKGGGGSGGGGSGGGGSQVQLVQSGAEVKKPGASVKVSCKASGYTFTSYWMHWVRQAPGQCLEWIGYITPSTGYTEYNQKFKGRVTMTRDKSTSTVYMELSSLTSEDTAVYYCARVHDYDRAMEYWGQGTTVTVSSGGGGSGGGGSGGGGSDIQMTQSPSSLSASVGDRVTITCKASQDINKYIAWYQQKPGKGPKLLIYYTSTLQPGVPSRFSGSGSGTDFTFTISSLQPEDIATYYCLQYASYPFTFGCGTRLEIKSGGGGSEVQLVESGGGLVQPGGSLKLSCAASGFTFNKYAMNWVRQAPGKGLEWVARIRSKYNNYATYYADSVKDRFTISRDDSKNTAYLQMNNLKTEDTAVYYCVRHGNFGNSYISYWAYWGQGTLVTVSSGGGGSGGGGSGGGGSQTVVTQEPSLTVSPGGTVTLTCGSSTGAVTSGNYPNWVQQKPGQAPRGLIGGTKFLAPGTPARFSGSLLGGKAALTLSGVQPEDEAEYYCVLWYSNRWVFGGGTKLTVL

SEQ ID NO: 374 - protein, 1500 aa, Synthetic construct
QVQLVQSGAEVKKPGASVKVSCKASGYTFTSYGISWVRQAPGQCLEWMGWISAYSGNAIYAQKLQGRVTMTRDTSTSTAYMELRSLRSDDTAVYYCARDPDYYGSGSYSDYWGQGTLVTVSSGGGGQGGGGQGGGGQEIVLTQSPATLSVSPGERATLSCRASQSVSSNLAWYQQKPGQAPRLLIYGASSRATGIPARFSGSGSGTEFTLTISSLQSEDFAVYYCQQYHSWPLLTFGCGTKVEIKSGGGGQEVQLVESGGGLVQPGGSLKLSCAASGFTFNKYAINWVRQAPGKGLEWVARIRSKYNNYATYYADAVKDRFTISRDDSKNTVYLQMNNLKTEDTAVYYCARAGNFGSSYISYWAYWGQGTLVTVSSGGGGQGGGGQGGGGQQTVVTQEPSLTVSPGGTVTITCGSSTGAVTSGNYPNWVQKKPGQAPRGLIGGTKFLAPGTPARFSGSLSGGKAALTLSGVQPEDEAEYYCVLWYSNRWVFGSGTKLTVLGGGGQGGGGQGGGGQCPPCPAPELLGGPSVFLFPPKPKDTLMISRTPEVTCVVVDVSHEEPEVKFNWYVDGVEVHNAKTKPCEEQYGSTYRCVSVLTVLHQDWLNGKEYKCKVSNKALPAPIEKTISKAKGQPREPQVYTLPPSREEMTKNQVSLTCLVKGFYPSDIAVEWESNGQPENNYKTTPPVLDSDGSFFLYSKLTVDKSRWQQGNVFSCSVMHEALHNHYTQKSLSLSPGKGGGGQGGGGQGGGGQGGGGQGGGGQGGGGQCPPCPAPELLGGPSVFLFPPKPKDTLMISRTPEVTCVVVDVSHEEPEVKFNWYVDGVEVHNAKTKPCEEQYGSTYRCVSVLTVLHQDWLNGKEYKCKVSNKALPAPIEKTISKAKGQPREPQVYTLPPSREEMTKNQVSLTCLVKGFYPSDIAVEWESNGQPENNYKTTPPVLDSDGSFFLYSKLTVDKSRWQQGNVFSCSVMHEALHNHYTQKSLSLSPGKGGGGQGGGGQGGGGQQVQLVQSGAEVKKPGASVKVSCKASGYTFTSYWMHWVRQAPGQCLEWIGYITPSTGYTEYNQKFKGRVTMTRDKSTSTVYMELSSLTSEDTAVYYCARVHDYDRAMEYWGQGTTVTVSSGGGGQGGGGQGGGGQEIQMTQSPSSLSASVGDRVTITCKASQDINKYIAWYQQKPGKGPKLLIYYTSTLQPGVPSRFSGSGSGTDFTFTISSLQPEDIATYYCLQYASYPFTFGCGTRLEIKSGGGGQEVQLVESGGGLVQPGGSLKLSCAASGFTFNKYAINWVRQAPGKGLEWVARIRSKYNNYATYYADAVKDRFTISRDDSKNTVYLQMNNLKTEDTAVYYCARAGNFGSSYISYWAYWGQGTLVTVSSGGGGQGGGGQGGGGQQTVVTQEPSLTVSPGGTVTITCGSSTGAVTSGNYPNWVQKKPGQAPRGLIGGTKFLAPGTPARFSGSLSGGKAALTLSGVQPEDEAEYYCVLWYSNRWVFGSGTKLTVL

SEQ ID NO: 375 - protein, 1478 aa, Synthetic construct
QVQLVQSGAEVKKPGASVKVSCKASGYTFTSYGISWVRQAPGQCLEWMGWISAYSGNAIYAQKLQGRVTMTRDTSTSTAYMELRSLRSDDTAVYYCARDPDYYGSGSYSDYWGQGTLVTVSSGGGGQGGGGQGGGGQEIVLTQSPATLSVSPGERATLSCRASQSVSSNLAWYQQKPGQAPRLLIYGASSRATGIPARFSGSGSGTEFTLTISSLQSEDFAVYYCQQYHSWPLLTFGCGTKVEIKSGGGGQEVQLVESGGGLVQPGGSLKLSCAASGFTFNKYAINWVRQAPGKGLEWVARIRSKYNNYATYYADAVKDRFTISRDDSKNTVYLQMNNLKTEDTAVYYCARAGNFGSSYISYWAYWGQGTLVTVSSGGGGQGGGGQGGGGQQTVVTQEPSLTVSPGGTVTITCGSSTGAVTSGNYPNWVQKKPGQAPRGLIGGTKFLAPGTPARFSGSLSGGKAALTLSGVQPEDEAEYYCVLWYSNRWVFGSGTKLTVLGGGGCPPCPAPELLGGPSVFLFPPKPKDTLMISRTPEVTCVVVDVSHEEPEVKFNWYVDGVEVHNAKTKPCEEQYGSTYRCVSVLTVLHQDWLNGKEYKCKVSNKALPAPIEKTISKAKGQPREPQVYTLPPSREEMTKNQVSLTCLVKGFYPSDIAVEWESNGQPENNYKTTPPVLDSDGSFFLYSKLTVDKSRWQQGNVFSCSVMHEALHNHYTQKSLSLSPGKGGGGQGGGGQGGGGQGGGGQGGGGQGGGGQCPPCPAPELLGGPSVFLFPPKPKDTLMISRTPEVTCVVVDVSHEEPEVKFNWYVDGVEVHNAKTKPCEEQYGSTYRCVSVLTVLHQDWLNGKEYKCKVSNKALPAPIEKTISKAKGQPREPQVYTLPPSREEMTKNQVSLTCLVKGFYPSDIAVEWESNGQPENNYKTTPPVLDSDGSFFLYSKLTVDKSRWQQGNVFSCSVMHEALHNHYTQKSLSLSPGKGGGGQVQLVQSGAEVKKPGASVKVSCKASGYTFTSYWMHWVRQAPGQCLEWIGYITPSTGYTEYNQKFKGRVTMTRDKSTSTVYMELSSLTSEDTAVYYCARVHDYDRAMEYWGQGTTVTVSSGGGGQGGGGQGGGGQEIQMTQSPSSLSASVGDRVTITCKASQDINKYIAWYQQKPGKGPKLLIYYTSTLQPGVPSRFSGSGSGTDFTFTISSLQPEDIATYYCLQYASYPFTFGCGTRLEIKSGGGGQEVQLVESGGGLVQPGGSLKLSCAASGFTFNKYAINWVRQAPGKGLEWVARIRSKYNNYATYYADAVKDRFTISRDDSKNTVYLQMNNLKTEDTAVYYCARAGNFGSSYISYWAYWGQGTLVTVSSGGGGQGGGGQGGGGQQTVVTQEPSLTVSPGGTVTITCGSSTGAVTSGNYPNWVQKKPGQAPRGLIGGTKFLAPGTPARFSGSLSGGKAALTLSGVQPEDEAEYYCVLWYSNRWVFGSGTKLTVL

SEQ ID NO: 376 - protein, 5 aa, Synthetic construct
DYYMH

SEQ ID NO: 377 - protein, 17 aa, Synthetic construct
WINPNSGGPNYAQKFQG

SEQ ID NO: 378 - protein, 12 aa, Synthetic construct
EKHAVAGIGFDY

SEQ ID NO: 379 - protein, 11 aa, Synthetic construct
QASQDISNYLN

SEQ ID NO: 380 - protein, 7 aa, Synthetic construct
AASSLES

SEQ ID NO: 381 - protein, 9 aa, Synthetic construct
QQANSFPLT

SEQ ID NO: 382 - protein, 121 aa, Synthetic construct
QVQLVQSGAEVKKPGASVKVSCKASGYTFTDYYMHWVRQAPGQCLEWMGWINPNSGGPNYAQKFQGRVTMTRDTSISTAHMELSRLRSDDTAVYYCAREKHAVAGIGFDYWGQGTLVTVSS

SEQ ID NO: 383 - protein, 107 aa, Synthetic construct
DIQMTQSPSSVSASVGDRVTITCQASQDISNYLNWYQQKPGKAPKLLIYAASSLESGVPSRFSGSGSGTDFTLTISSLQPEDFATYYCQQANSFPLTFGCGTKVDIK

SEQ ID NO: 384 - protein, 107 aa, Synthetic construct
EIQMTQSPSSVSASVGDRVTITCQASQDISNYLNWYQQKPGKAPKLLIYAASSLESGVPSRFSGSGSGTDFTLTISSLQPEDFATYYCQQANSFPLTFGCGTKVDIK

SEQ ID NO: 385 - protein, 7 aa, Synthetic construct
NARMGVS

SEQ ID NO: 386 - protein, 16 aa, Synthetic construct
HIFSNDEKSYSTSLKS

SEQ ID NO: 387 - protein, 13 aa, Synthetic construct
VPEYSSGWYRFDY

SEQ ID NO: 388 - protein, 11 aa, Synthetic construct
RASQSIRSYLN

SEQ ID NO: 389 - protein, 7 aa, Synthetic construct
ATSSLQG

SEQ ID NO: 390 - protein, 9 aa, Synthetic construct
QQSYSTPFT

SEQ ID NO: 391 - protein, 123 aa, Synthetic construct
QVTLKESGPTLVKPTETLTLTCTVSGFSFRNARMGVSWIRQPPGKCLEWLAHIFSNDEKSYSTSLKSRLTISKDTSKSQVVLTMTNMDPVDTATYFCARVPEYSSGWYRFDYWGQGTLVTVSS

SEQ ID NO: 392 - protein, 107 aa, Synthetic construct
DIQMTQSPSSLSASVGDRVTISCRASQSIRSYLNWYQQKPGKAPKLLIYATSSLQGGVPSRFSGSGSGTDFTLTISSLQPEDFATYYCQQSYSTPFTFGCGTKVEIK

SEQ ID NO: 393 - protein, 107 aa, Synthetic construct
EIQMTQSPSSLSASVGDRVTISCRASQSIRSYLNWYQQKPGKAPKLLIYATSSLQGGVPSRFSGSGSGTDFTLTISSLQPEDFATYYCQQSYSTPFTFGCGTKVEIK

SEQ ID NO: 394 - protein, 1512 aa, Synthetic construct
QVQLVQSGAEVKKPGASVKVSCKASGYTFTDYYMHWVRQAPGQCLEWMGWINPNSGGPNYAQKFQGRVTMTRDTSISTAHMELSRLRSDDTAVYYCAREKHAVAGIGFDYWGQGTLVTVSSGGGGSGGGGSGGGGSDIQMTQSPSSVSASVGDRVTITCQASQDISNYLNWYQQKPGKAPKLLIYAASSLESGVPSRFSGSGSGTDFTLTISSLQPEDFATYYCQQANSFPLTFGCGTKVDIKSGGGGSEVQLVESGGGLVQPGGSLKLSCAASGFTFNKYAMNWVRQAPGKGMEWVARIRSKYNNYATYYADAVKDRFTISRDDSKNTLYLQMNNLKTEDTAVYYCVRAGNFGKSYISYWAYWGQGTLVTVSSGGGGSGGGGSGGGGSQTVVTQEPSLTVSPGGTVTITCGSSTGAVTSGNYPNWVQKKPGQAPRGLIGGTKFLAPGTPARFSGSLSGGKAALTLSGVQPEDEAEYYCVLWYSNRWVFGSGTKLTVLGGGGSGGGGSGGGGSDKTHTCPPCPAPELLGGPSVFLFPPKPKDTLMISRTPEVTCVVVDVSHEDPEVKFNWYVDGVEVHNAKTKPCEEQYGSTYRCVSVLTVLHQDWLNGKEYKCKVSNKALPAPIEKTISKAKGQPREPQVYTLPPSREEMTKNQVSLTCLVKGFYPSDIAVEWESNGQPENNYKTTPPVLDSDGSFFLYSKLTVDKSRWQQGNVFSCSVMHEALHNHYTQKSLSLSPGKGGGGSGGGGSGGGGSGGGGSGGGGSGGGGSDKTHTCPPCPAPELLGGPSVFLFPPKPKDTLMISRTPEVTCVVVDVSHEDPEVKFNWYVDGVEVHNAKTKPCEEQYGSTYRCVSVLTVLHQDWLNGKEYKCKVSNKALPAPIEKTISKAKGQPREPQVYTLPPSREEMTKNQVSLTCLVKGFYPSDIAVEWESNGQPENNYKTTPPVLDSDGSFFLYSKLTVDKSRWQQGNVFSCSVMHEALHNHYTQKSLSLSPGKGGGGSGGGGSGGGGSQVTLKESGPTLVKPTETLTLTCTVSGFSFRNARMGVSWIRQPPGKCLEWLAHIFSNDEKSYSTSLKSRLTISKDTSKSQVVLTMTNMDPVDTATYFCARVPEYSSGWYRFDYWGQGTLVTVSSGGGGSGGGGSGGGGSDIQMTQSPSSLSASVGDRVTISCRASQSIRSYLNWYQQKPGKAPKLLIYATSSLQGGVPSRFSGSGSGTDFTLTISSLQPEDFATYYCQQSYSTPFTFGCGTKVEIKSGGGGSEVQLVESGGGLVQPGGSLKLSCAASGFTFNKYAMNWVRQAPGKGMEWVARIRSKYNNYATYYADAVKDRFTISRDDSKNTLYLQMNNLKTEDTAVYYCVRAGNFGKSYISYWAYWGQGTLVTVSSGGGGSGGGGSGGGGSQTVVTQEPSLTVSPGGTVTITCGSSTGAVTSGNYPNWVQKKPGQAPRGLIGGTKFLAPGTPARFSGSLSGGKAALTLSGVQPEDEAEYYCVLWYSNRWVFGSGTKLTVL

SEQ ID NO: 395 - protein, 1512 aa, Synthetic construct
QVQLVQSGAEVKKPGASVKVSCKASGYTFTDYYMHWVRQAPGQCLEWMGWINPNSGGPNYAQKFQGRVTMTRDTSISTAHMELSRLRSDDTAVYYCAREKHAVAGIGFDYWGQGTLVTVSSGGGGSGGGGSGGGGSDIQMTQSPSSVSASVGDRVTITCQASQDISNYLNWYQQKPGKAPKLLIYAASSLESGVPSRFSGSGSGTDFTLTISSLQPEDFATYYCQQANSFPLTFGCGTKVDIKSGGGGSEVQLVESGGGLVQPGGSLKLSCAASGFTFSKYAMNWVREAPGKGLEWVARIRSKYNNYATYYAEAVKDRFTISRDDSKNTVYLQMNNLKTEDTAVYYCVRAENIGKSYISYWAYWGQGTLVTVSSGGGGSGGGGSGGGGSQTVVTQEPSLTVSPGGTVTMTCGSSTGAVTSGNYPNWVQKKPGQAPRGLIGGTKFLAPGTPARFSGSLEGGKAALTLSGVQPEDEAEYYCVLWYSNRWVFGGGTKLTVLGGGGSGGGGSGGGGSDKTHTCPPCPAPELLGGPSVFLFPPKPKDTLMISRTPEVTCVVVDVSHEDPEVKFNWYVDGVEVHNAKTKPCEEQYGSTYRCVSVLTVLHQDWLNGKEYKCKVSNKALPAPIEKTISKAKGQPREPQVYTLPPSREEMTKNQVSLTCLVKGFYPSDIAVEWESNGQPENNYKTTPPVLDSDGSFFLYSKLTVDKSRWQQGNVFSCSVMHEALHNHYTQKSLSLSPGKGGGGSGGGGSGGGGSGGGGSGGGGSGGGGSDKTHTCPPCPAPELLGGPSVFLFPPKPKDTLMISRTPEVTCVVVDVSHEDPEVKFNWYVDGVEVHNAKTKPCEEQYGSTYRCVSVLTVLHQDWLNGKEYKCKVSNKALPAPIEKTISKAKGQPREPQVYTLPPSREEMTKNQVSLTCLVKGFYPSDIAVEWESNGQPENNYKTTPPVLDSDGSFFLYSKLTVDKSRWQQGNVFSCSVMHEALHNHYTQKSLSLSPGKGGGGSGGGGSGGGGSQVTLKESGPTLVKPTETLTLTCTVSGFSFRNARMGVSWIRQPPGKCLEWLAHIFSNDEKSYSTSLKSRLTISKDTSKSQVVLTMTNMDPVDTATYFCARVPEYSSGWYRFDYWGQGTLVTVSSGGGGSGGGGSGGGGSDIQMTQSPSSLSASVGDRVTISCRASQSIRSYLNWYQQKPGKAPKLLIYATSSLQGGVPSRFSGSGSGTDFTLTISSLQPEDFATYYCQQSYSTPFTFGCGTKVEIKSGGGGSEVQLVESGGGLVQPGGSLKLSCAASGFTFSKYAMNWVREAPGKGLEWVARIRSKYNNYATYYAEAVKDRFTISRDDSKNTVYLQMNNLKTEDTAVYYCVRAENIGKSYISYWAYWGQGTLVTVSSGGGGSGGGGSGGGGSQTVVTQEPSLTVSPGGTVTMTCGSSTGAVTSGNYPNWVQKKPGQAPRGLIGGTKFLAPGTPARFSGSLEGGKAALTLSGVQPEDEAEYYCVLWYSNRWVFGGGTKLTVL

SEQ ID NO: 396 - protein, 1512 aa, Synthetic construct
QVQLVQSGAEVKKPGASVKVSCKASGYTFTDYYMHWVRQAPGQCLEWMGWINPNSGGPNYAQKFQGRVTMTRDTSISTAHMELSRLRSDDTAVYYCAREKHAVAGIGFDYWGQGTLVTVSSGGGGSGGGGSGGGGSDIQMTQSPSSVSASVGDRVTITCQASQDISNYLNWYQQKPGKAPKLLIYAASSLESGVPSRFSGSGSGTDFTLTISSLQPEDFATYYCQQANSFPLTFGCGTKVDIKSGGGGSEVQLVESGGGLVQPGGSLKLSCAASGFTFSKYAMNWVRQAPGKGMEWVARIRSKYNNYATYYAEAVKGRFTISRDDSKNTVYLQMNNLKTEDTAVYYCVRAGNFGSSYISYWAYWGQGTLVTVSSGGGGSGGGGSGGGGSQTVVTQEPSLTVSPGGTVTLTCGSSTGAVTSGNYPNWVQKKPGQAPRGLIGGTKFLAPGTPARFSGSLSGGKAALTLSGVQPEDEAEYYCVLWYSNRWVFGGGTKLTVLGGGGSGGGGSGGGGSDKTHTCPPCPAPELLGGPSVFLFPPKPKDTLMISRTPEVTCVVVDVSHEDPEVKFNWYVDGVEVHNAKTKPCEEQYGSTYRCVSVLTVLHQDWLNGKEYKCKVSNKALPAPIEKTISKAKGQPREPQVYTLPPSREEMTKNQVSLTCLVKGFYPSDIAVEWESNGQPENNYKTTPPVLDSDGSFFLYSKLTVDKSRWQQGNVFSCSVMHEALHNHYTQKSLSLSPGKGGGGSGGGGSGGGGSGGGGSGGGGSGGGGSDKTHTCPPCPAPELLGGPSVFLFPPKPKDTLMISRTPEVTCVVVDVSHEDPEVKFNWYVDGVEVHNAKTKPCEEQYGSTYRCVSVLTVLHQDWLNGKEYKCKVSNKALPAPIEKTISKAKGQPREPQVYTLPPSREEMTKNQVSLTCLVKGFYPSDIAVEWESNGQPENNYKTTPPVLDSDGSFFLYSKLTVDKSRWQQGNVFSCSVMHEALHNHYTQKSLSLSPGKGGGGSGGGGSGGGGSQVTLKESGPTLVKPTETLTLTCTVSGFSFRNARMGVSWIRQPPGKCLEWLAHIFSNDEKSYSTSLKSRLTISKDTSKSQVVLTMTNMDPVDTATYFCARVPEYSSGWYRFDYWGQGTLVTVSSGGGGSGGGGSGGGGSDIQMTQSPSSLSASVGDRVTISCRASQSIRSYLNWYQQKPGKAPKLLIYATSSLQGGVPSRFSGSGSGTDFTLTISSLQPEDFATYYCQQSYSTPFTFGCGTKVEIKSGGGGSEVQLVESGGGLVQPGGSLKLSCAASGFTFSKYAMNWVRQAPGKGMEWVARIRSKYNNYATYYAEAVKGRFTISRDDSKNTVYLQMNNLKTEDTAVYYCVRAGNFGSSYISYWAYWGQGTLVTVSSGGGGSGGGGSGGGGSQTVVTQEPSLTVSPGGTVTLTCGSSTGAVTSGNYPNWVQKKPGQAPRGLIGGTKFLAPGTPARFSGSLSGGKAALTLSGVQPEDEAEYYCVLWYSNRWVFGGGTKLTVL

SEQ ID NO: 397 - protein, 1512 aa, Synthetic construct
QVQLVQSGAEVKKPGASVKVSCKASGYTFTDYYMHWVRQAPGQCLEWMGWINPNSGGPNYAQKFQGRVTMTRDTSISTAHMELSRLRSDDTAVYYCAREKHAVAGIGFDYWGQGTLVTVSSGGGGSGGGGSGGGGSDIQMTQSPSSVSASVGDRVTITCQASQDISNYLNWYQQKPGKAPKLLIYAASSLESGVPSRFSGSGSGTDFTLTISSLQPEDFATYYCQQANSFPLTFGCGTKVDIKSGGGGSEVQLVESGGGLVQPGGSLKLSCAASGFTFSKYAMNWVRQAPGKGMEWVARIRSKYNNYATYYADAVKGRFTISRDDSKNTVYLQMNNLKTEDTAVYYCVRAGNFGKSYISYFAYWGQGTLVTVSSGGGGSGGGGSGGGGSQTVVTQEPSLTVSPGGTVTLTCGSSTGAVTSGNYPNWVQKKPGQAPRGLIGGTKFLAPGTPARFSGSLSGGKAALTLSGVQPEDEAEYYCVLYYSNRWVFGGGTKLTVLGGGGSGGGGSGGGGSDKTHTCPPCPAPELLGGPSVFLFPPKPKDTLMISRTPEVTCVVVDVSHEDPEVKFNWYVDGVEVHNAKTKPCEEQYGSTYRCVSVLTVLHQDWLNGKEYKCKVSNKALPAPIEKTISKAKGQPREPQVYTLPPSREEMTKNQVSLTCLVKGFYPSDIAVEWESNGQPENNYKTTPPVLDSDGSFFLYSKLTVDKSRWQQGNVFSCSVMHEALHNHYTQKSLSLSPGKGGGGSGGGGSGGGGSGGGGSGGGGSGGGGSDKTHTCPPCPAPELLGGPSVFLFPPKPKDTLMISRTPEVTCVVVDVSHEDPEVKFNWYVDGVEVHNAKTKPCEEQYGSTYRCVSVLTVLHQDWLNGKEYKCKVSNKALPAPIEKTISKAKGQPREPQVYTLPPSREEMTKNQVSLTCLVKGFYPSDIAVEWESNGQPENNYKTTPPVLDSDGSFFLYSKLTVDKSRWQQGNVFSCSVMHEALHNHYTQKSLSLSPGKGGGGSGGGGSGGGGSQVTLKESGPTLVKPTETLTLTCTVSGFSFRNARMGVSWIRQPPGKCLEWLAHIFSNDEKSYSTSLKSRLTISKDTSKSQVVLTMTNMDPVDTATYFCARVPEYSSGWYRFDYWGQGTLVTVSSGGGGSGGGGSGGGGSDIQMTQSPSSLSASVGDRVTISCRASQSIRSYLNWYQQKPGKAPKLLIYATSSLQGGVPSRFSGSGSGTDFTLTISSLQPEDFATYYCQQSYSTPFTFGCGTKVEIKSGGGGSEVQLVESGGGLVQPGGSLKLSCAASGFTFSKYAMNWVRQAPGKGMEWVARIRSKYNNYATYYADAVKGRFTISRDDSKNTVYLQMNNLKTEDTAVYYCVRAGNFGKSYISYFAYWGQGTLVTVSSGGGGSGGGGSGGGGSQTVVTQEPSLTVSPGGTVTLTCGSSTGAVTSGNYPNWVQKKPGQAPRGLIGGTKFLAPGTPARFSGSLSGGKAALTLSGVQPEDEAEYYCVLYYSNRWVFGGGTKLTVL

SEQ ID NO: 398 - protein, 1512 aa, Synthetic construct
QVQLVQSGAEVKKPGASVKVSCKASGYTFTDYYMHWVRQAPGQCLEWMGWINPNSGGPNYAQKFQGRVTMTRDTSISTAHMELSRLRSDDTAVYYCAREKHAVAGIGFDYWGQGTLVTVSSGGGGSGGGGSGGGGSDIQMTQSPSSVSASVGDRVTITCQASQDISNYLNWYQQKPGKAPKLLIYAASSLESGVPSRFSGSGSGTDFTLTISSLQPEDFATYYCQQANSFPLTFGCGTKVDIKSGGGGSEVQLVESGGGLVQPGGSLKLSCAASGFTFNKYAMNWVRQAPGKGMEWVARIRSKYNNYATYYAEAVKDRFTISRDDSKNTLYLQMNNLKTEDTAVYYCVRAGNFGKSYISYWAYWGQGTLVTVSSGGGGSGGGGSGGGGSQTVVTQEPSLTVSPGGTVTITCGSSTGAVTSGNYPNWIQKKPGQAPRGLIGGTKFLAPGTPARFSGSLEGGKAALTLSGVQPEDEAEYYCVLWYSNRWVFGSGTKLTVLGGGGSGGGGSGGGGSDKTHTCPPCPAPELLGGPSVFLFPPKPKDTLMISRTPEVTCVVVDVSHEDPEVKFNWYVDGVEVHNAKTKPCEEQYGSTYRCVSVLTVLHQDWLNGKEYKCKVSNKALPAPIEKTISKAKGQPREPQVYTLPPSREEMTKNQVSLTCLVKGFYPSDIAVEWESNGQPENNYKTTPPVLDSDGSFFLYSKLTVDKSRWQQGNVFSCSVMHEALHNHYTQKSLSLSPGKGGGGSGGGGSGGGGSGGGGSGGGGSGGGGSDKTHTCPPCPAPELLGGPSVFLFPPKPKDTLMISRTPEVTCVVVDVSHEDPEVKFNWYVDGVEVHNAKTKPCEEQYGSTYRCVSVLTVLHQDWLNGKEYKCKVSNKALPAPIEKTISKAKGQPREPQVYTLPPSREEMTKNQVSLTCLVKGFYPSDIAVEWESNGQPENNYKTTPPVLDSDGSFFLYSKLTVDKSRWQQGNVFSCSVMHEALHNHYTQKSLSLSPGKGGGGSGGGGSGGGGSQVTLKESGPTLVKPTETLTLTCTVSGFSFRNARMGVSWIRQPPGKCLEWLAHIFSNDEKSYSTSLKSRLTISKDTSKSQVVLTMTNMDPVDTATYFCARVPEYSSGWYRFDYWGQGTLVTVSSGGGGSGGGGSGGGGSDIQMTQSPSSLSASVGDRVTISCRASQSIRSYLNWYQQKPGKAPKLLIYATSSLQGGVPSRFSGSGSGTDFTLTISSLQPEDFATYYCQQSYSTPFTFGCGTKVEIKSGGGGSEVQLVESGGGLVQPGGSLKLSCAASGFTFNKYAMNWVRQAPGKGMEWVARIRSKYNNYATYYAEAVKDRFTISRDDSKNTLYLQMNNLKTEDTAVYYCVRAGNFGKSYISYWAYWGQGTLVTVSSGGGGSGGGGSGGGGSQTVVTQEPSLTVSPGGTVTITCGSSTGAVTSGNYPNWIQKKPGQAPRGLIGGTKFLAPGTPARFSGSLEGGKAALTLSGVQPEDEAEYYCVLWYSNRWVFGSGTKLTVL

SEQ ID NO: 399 - protein, 1512 aa, Synthetic construct
QVQLVQSGAEVKKPGASVKVSCKASGYTFTDYYMHWVRQAPGQCLEWMGWINPNSGGPNYAQKFQGRVTMTRDTSISTAHMELSRLRSDDTAVYYCAREKHAVAGIGFDYWGQGTLVTVSSGGGGSGGGGSGGGGSDIQMTQSPSSVSASVGDRVTITCQASQDISNYLNWYQQKPGKAPKLLIYAASSLESGVPSRFSGSGSGTDFTLTISSLQPEDFATYYCQQANSFPLTFGCGTKVDIKSGGGGSEVQLVESGGGLVQPGGSLKLSCAASGFTFNKYAMNWVRQAPGKGMEWVARIRSKYNNYATYYADAVKDRFTISRDDSKNTLYLQMNNLKTEDTAVYYCVRAGNFGSSYISYFAYWGQGTLVTVSSGGGGSGGGGSGGGGSQTVVTQEPSLTVSPGGTVTITCGSSTGAVTSGNYPNWIQKKPGQAPRGLIGGTKFLAPGTPARFSGSLEGGKAALTLSGVQPEDEAEYYCVLYYSNRWVFGSGTKLTVLGGGGSGGGGSGGGGSDKTHTCPPCPAPELLGGPSVFLFPPKPKDTLMISRTPEVTCVVVDVSHEDPEVKFNWYVDGVEVHNAKTKPCEEQYGSTYRCVSVLTVLHQDWLNGKEYKCKVSNKALPAPIEKTISKAKGQPREPQVYTLPPSREEMTKNQVSLTCLVKGFYPSDIAVEWESNGQPENNYKTTPPVLDSDGSFFLYSKLTVDKSRWQQGNVFSCSVMHEALHNHYTQKSLSLSPGKGGGGSGGGGSGGGGSGGGGSGGGGSGGGGSDKTHTCPPCPAPELLGGPSVFLFPPKPKDTLMISRTPEVTCVVVDVSHEDPEVKFNWYVDGVEVHNAKTKPCEEQYGSTYRCVSVLTVLHQDWLNGKEYKCKVSNKALPAPIEKTISKAKGQPREPQVYTLPPSREEMTKNQVSLTCLVKGFYPSDIAVEWESNGQPENNYKTTPPVLDSDGSFFLYSKLTVDKSRWQQGNVFSCSVMHEALHNHYTQKSLSLSPGKGGGGSGGGGSGGGGSQVTLKESGPTLVKPTETLTLTCTVSGFSFRNARMGVSWIRQPPGKCLEWLAHIFSNDEKSYSTSLKSRLTISKDTSKSQVVLTMTNMDPVDTATYFCARVPEYSSGWYRFDYWGQGTLVTVSSGGGGSGGGGSGGGGSDIQMTQSPSSLSASVGDRVTISCRASQSIRSYLNWYQQKPGKAPKLLIYATSSLQGGVPSRFSGSGSGTDFTLTISSLQPEDFATYYCQQSYSTPFTFGCGTKVEIKSGGGGSEVQLVESGGGLVQPGGSLKLSCAASGFTFNKYAMNWVRQAPGKGMEWVARIRSKYNNYATYYADAVKDRFTISRDDSKNTLYLQMNNLKTEDTAVYYCVRAGNFGSSYISYFAYWGQGTLVTVSSGGGGSGGGGSGGGGSQTVVTQEPSLTVSPGGTVTITCGSSTGAVTSGNYPNWIQKKPGQAPRGLIGGTKFLAPGTPARFSGSLEGGKAALTLSGVQPEDEAEYYCVLYYSNRWVFGSGTKLTVL

SEQ ID NO: 400 - protein, 1511 aa, Synthetic construct
QVQLVQSGAEVKKPGASVKVSCKASGYTFTDYYMHWVRQAPGQCLEWMGWINPNSGGPNYAQKFQGRVTMTRDTSISTAHMELSRLRSDDTAVYYCAREKHAVAGIGFDYWGQGTLVTVSSGGGGSGGGGSGGGGSDIQMTQSPSSVSASVGDRVTITCQASQDISNYLNWYQQKPGKAPKLLIYAASSLESGVPSRFSGSGSGTDFTLTISSLQPEDFATYYCQQANSFPLTFGCGTKVDIKSGGGGSEVQLVESGGGLVQPGGSLKLSCAASGFTFNKYAMNWVRQAPGKGLEWVARIRSKYNNYATYYADSVKDRFTISRDDSKNTAYLQMNNLKTEDTAVYYCVRHGNFGNSYISYWAYWGQGTLVTVSSGGGGSGGGGSGGGGSQTVVTQEPSLTVSPGGTVTLTCGSSTGAVTSGNYPNWVQQKPGQAPRGLIGGTKFLAPGTPARFSGSLLGGKAALTLSGVQPEDEAEYYCVLWYSNRWVFGGGTKLTVLGGGGSGGGGSGGGGSDKTHTCPPCPAPELLGGPSVFLFPPKPKDTLMISRTPEVTCVVVDVSHEDPEVKFNWYVDGVEVHNAKTKPCEEQYGSTYRCVSVLTVLHQDWLNGKEYKCKVSNKALPAPIEKTISKAKGQPREPQVYTLPPSREEMTKNQVSLTCLVKGFYPSDIAVEWESNGQPENNYKTTPPVLDSDGSFFLYSKLTVDKSRWQQGNVFSCSVMHEALHNHYTQKSLSLSPGKGGGGSGGGGSGGGGSGGGGSGGGGSGGGGSDKTHTCPPCPAPELLGGPSVFLFPPKPKDTLMISRTPEVTCVVVDVSHEDPEVKFNWYVDGVEVHNAKTKPCEEQYGSTYRCVSVLTVLHQDWLNGKEYKCKVSNKALPAPIEKTISKAKGQPREPQVYTLPPSREEMTKNQVSLTCLVKGFYPSDIAVEWESNGQPENNYKTTPPVLDSDGSFFLYSKLTVDKSRWQQGNVFSCSVMHEALHNHYTQKSLSLSPGKGGGGSGGGGSGGGGSEVQLVESGGGLVQPGGSLKLSCAASGFTFNKYAMNWVRQAPGKGLEWVARIRSKYNNYATYYADSVKDRFTISRDDSKNTAYLQMNNLKTEDTAVYYCVRHGNFGNSYISYWAYWGQGTLVTVSSGGGGSGGGGSGGGGSQTVVTQEPSLTVSPGGTVTLTCGSSTGAVTSGNYPNWVQQKPGQAPRGLIGGTKFLAPGTPARFSGSLLGGKAALTLSGVQPEDEAEYYCVLWYSNRWVFGGGTKLTVLGGGGSQVTLKESGPTLVKPTETLTLTCTVSGFSFRNARMGVSWIRQPPGKCLEWLAHIFSNDEKSYSTSLKSRLTISKDTSKSQVVLTMTNMDPVDTATYFCARVPEYSSGWYRFDYWGQGTLVTVSSGGGGSGGGGSGGGGSDIQMTQSPSSLSASVGDRVTISCRASQSIRSYLNWYQQKPGKAPKLLIYATSSLQGGVPSRFSGSGSGTDFTLTISSLQPEDFATYYCQQSYSTPFTFGCGTKVEIK

SEQ ID NO: 401 - protein, 1512 aa, Synthetic construct
QVQLVQSGAEVKKPGASVKVSCKASGYTFTDYYMHWVRQAPGQCLEWMGWINPNSGGPNYAQKFQGRVTMTRDTSISTAHMELSRLRSDDTAVYYCAREKHAVAGIGFDYWGQGTLVTVSSGGGGSGGGGSGGGGSDIQMTQSPSSVSASVGDRVTITCQASQDISNYLNWYQQKPGKAPKLLIYAASSLESGVPSRFSGSGSGTDFTLTISSLQPEDFATYYCQQANSFPLTFGCGTKVDIKSGGGGSEVQLVESGGGLVQPGGSLKLSCAASGFTFNKYAMNWVRQAPGKGLEWVARIRSKYNNYATYYADSVKDRFTISRDDSKNTAYLQMNNLKTEDTAVYYCVRHGNFGNSYISYWAYWGQGTLVTVSSGGGGSGGGGSGGGGSQTVVTQEPSLTVSPGGTVTLTCGSSTGAVTSGNYPNWVQQKPGQAPRGLIGGTKFLAPGTPARFSGSLLGGKAALTLSGVQPEDEAEYYCVLWYSNRWVFGGGTKLTVLGGGGSGGGGSGGGGSDKTHTCPPCPAPELLGGPSVFLFPPKPKDTLMISRTPEVTCVVVDVSHEDPEVKFNWYVDGVEVHNAKTKPCEEQYGSTYRCVSVLTVLHQDWLNGKEYKCKVSNKALPAPIEKTISKAKGQPREPQVYTLPPSREEMTKNQVSLTCLVKGFYPSDIAVEWESNGQPENNYKTTPPVLDSDGSFFLYSKLTVDKSRWQQGNVFSCSVMHEALHNHYTQKSLSLSPGKGGGGSGGGGSGGGGSGGGGSGGGGSGGGGSDKTHTCPPCPAPELLGGPSVFLFPPKPKDTLMISRTPEVTCVVVDVSHEDPEVKFNWYVDGVEVHNAKTKPCEEQYGSTYRCVSVLTVLHQDWLNGKEYKCKVSNKALPAPIEKTISKAKGQPREPQVYTLPPSREEMTKNQVSLTCLVKGFYPSDIAVEWESNGQPENNYKTTPPVLDSDGSFFLYSKLTVDKSRWQQGNVFSCSVMHEALHNHYTQKSLSLSPGKGGGGSGGGGSGGGGSQVTLKESGPTLVKPTETLTLTCTVSGFSFRNARMGVSWIRQPPGKCLEWLAHIFSNDEKSYSTSLKSRLTISKDTSKSQVVLTMTNMDPVDTATYFCARVPEYSSGWYRFDYWGQGTLVTVSSGGGGSGGGGSGGGGSDIQMTQSPSSLSASVGDRVTISCRASQSIRSYLNWYQQKPGKAPKLLIYATSSLQGGVPSRFSGSGSGTDFTLTISSLQPEDFATYYCQQSYSTPFTFGCGTKVEIKSGGGGSEVQLVESGGGLVQPGGSLKLSCAASGFTFNKYAMNWVRQAPGKGLEWVARIRSKYNNYATYYADSVKDRFTISRDDSKNTAYLQMNNLKTEDTAVYYCVRHGNFGNSYISYWAYWGQGTLVTVSSGGGGSGGGGSGGGGSQTVVTQEPSLTVSPGGTVTLTCGSSTGAVTSGNYPNWVQQKPGQAPRGLIGGTKFLAPGTPARFSGSLLGGKAALTLSGVQPEDEAEYYCVLWYSNRWVFGGGTKLTVL

SEQ ID NO: 402 - protein, 1512 aa, Synthetic construct
QVQLVQSGAEVKKPGASVKVSCKASGYTFTDYYMHWVRQAPGQCLEWMGWINPNSGGPNYAQKFQGRVTMTRDTSISTAHMELSRLRSDDTAVYYCAREKHAVAGIGFDYWGQGTLVTVSSGGGGSGGGGSGGGGSDIQMTQSPSSVSASVGDRVTITCQASQDISNYLNWYQQKPGKAPKLLIYAASSLESGVPSRFSGSGSGTDFTLTISSLQPEDFATYYCQQANSFPLTFGCGTKVDIKSGGGGSEVQLVESGGGLVQPGGSLKLSCAASGFTFNKYAMNWVRQAPGKCLEWVARIRSKYNNYATYYADSVKDRFTISRDDSKNTAYLQMNNLKTEDTAVYYCVRHGNFGNSYISYWAYWGQGTLVTVSSGGGGSGGGGSGGGGSQTVVTQEPSLTVSPGGTVTLTCGSSTGAVTSGNYPNWVQQKPGQAPRGLIGGTKFLAPGTPARFSGSLLGGKAALTLSGVQPEDEAEYYCVLWYSNRWVFGCGTKLTVLGGGGSGGGGSGGGGSDKTHTCPPCPAPELLGGPSVFLFPPKPKDTLMISRTPEVTCVVVDVSHEDPEVKFNWYVDGVEVHNAKTKPCEEQYGSTYRCVSVLTVLHQDWLNGKEYKCKVSNKALPAPIEKTISKAKGQPREPQVYTLPPSREEMTKNQVSLTCLVKGFYPSDIAVEWESNGQPENNYKTTPPVLDSDGSFFLYSKLTVDKSRWQQGNVFSCSVMHEALHNHYTQKSLSLSPGKGGGGSGGGGSGGGGSGGGGSGGGGSGGGGSDKTHTCPPCPAPELLGGPSVFLFPPKPKDTLMISRTPEVTCVVVDVSHEDPEVKFNWYVDGVEVHNAKTKPCEEQYGSTYRCVSVLTVLHQDWLNGKEYKCKVSNKALPAPIEKTISKAKGQPREPQVYTLPPSREEMTKNQVSLTCLVKGFYPSDIAVEWESNGQPENNYKTTPPVLDSDGSFFLYSKLTVDKSRWQQGNVFSCSVMHEALHNHYTQKSLSLSPGKGGGGSGGGGSGGGGSQVTLKESGPTLVKPTETLTLTCTVSGFSFRNARMGVSWIRQPPGKCLEWLAHIFSNDEKSYSTSLKSRLTISKDTSKSQVVLTMTNMDPVDTATYFCARVPEYSSGWYRFDYWGQGTLVTVSSGGGGSGGGGSGGGGSDIQMTQSPSSLSASVGDRVTISCRASQSIRSYLNWYQQKPGKAPKLLIYATSSLQGGVPSRFSGSGSGTDFTLTISSLQPEDFATYYCQQSYSTPFTFGCGTKVEIKSGGGGSEVQLVESGGGLVQPGGSLKLSCAASGFTFNKYAMNWVRQAPGKCLEWVARIRSKYNNYATYYADSVKDRFTISRDDSKNTAYLQMNNLKTEDTAVYYCVRHGNFGNSYISYWAYWGQGTLVTVSSGGGGSGGGGSGGGGSQTVVTQEPSLTVSPGGTVTLTCGSSTGAVTSGNYPNWVQQKPGQAPRGLIGGTKFLAPGTPARFSGSLLGGKAALTLSGVQPEDEAEYYCVLWYSNRWVFGCGTKLTVL

SEQ ID NO: 403 - protein, 1511 aa, Synthetic construct
QVQLVQSGAEVKKPGASVKVSCKASGYTFTDYYMHWVRQAPGQCLEWMGWINPNSGGPNYAQKFQGRVTMTRDTSISTAHMELSRLRSDDTAVYYCAREKHAVAGIGFDYWGQGTLVTVSSGGGGSGGGGSGGGGSDIQMTQSPSSVSASVGDRVTITCQASQDISNYLNWYQQKPGKAPKLLIYAASSLESGVPSRFSGSGSGTDFTLTISSLQPEDFATYYCQQANSFPLTFGCGTKVDIKSGGGGSEVQLVESGGGLVQPGGSLKLSCAASGFTFNKYAMNWVRQAPGKCLEWVARIRSKYNNYATYYADSVKDRFTISRDDSKNTAYLQMNNLKTEDTAVYYCVRHGNFGNSYISYWAYWGQGTLVTVSSGGGGSGGGGSGGGGSQTVVTQEPSLTVSPGGTVTLTCGSSTGAVTSGNYPNWVQQKPGQAPRGLIGGTKFLAPGTPARFSGSLLGGKAALTLSGVQPEDEAEYYCVLWYSNRWVFGCGTKLTVLGGGGSGGGGSGGGGSDKTHTCPPCPAPELLGGPSVFLFPPKPKDTLMISRTPEVTCVVVDVSHEDPEVKFNWYVDGVEVHNAKTKPCEEQYGSTYRCVSVLTVLHQDWLNGKEYKCKVSNKALPAPIEKTISKAKGQPREPQVYTLPPSREEMTKNQVSLTCLVKGFYPSDIAVEWESNGQPENNYKTTPPVLDSDGSFFLYSKLTVDKSRWQQGNVFSCSVMHEALHNHYTQKSLSLSPGKGGGGSGGGGSGGGGSGGGGSGGGGSGGGGSDKTHTCPPCPAPELLGGPSVFLFPPKPKDTLMISRTPEVTCVVVDVSHEDPEVKFNWYVDGVEVHNAKTKPCEEQYGSTYRCVSVLTVLHQDWLNGKEYKCKVSNKALPAPIEKTISKAKGQPREPQVYTLPPSREEMTKNQVSLTCLVKGFYPSDIAVEWESNGQPENNYKTTPPVLDSDGSFFLYSKLTVDKSRWQQGNVFSCSVMHEALHNHYTQKSLSLSPGKGGGGSGGGGSGGGGSEVQLVESGGGLVQPGGSLKLSCAASGFTFNKYAMNWVRQAPGKCLEWVARIRSKYNNYATYYADSVKDRFTISRDDSKNTAYLQMNNLKTEDTAVYYCVRHGNFGNSYISYWAYWGQGTLVTVSSGGGGSGGGGSGGGGSQTVVTQEPSLTVSPGGTVTLTCGSSTGAVTSGNYPNWVQQKPGQAPRGLIGGTKFLAPGTPARFSGSLLGGKAALTLSGVQPEDEAEYYCVLWYSNRWVFGCGTKLTVLGGGGSQVTLKESGPTLVKPTETLTLTCTVSGFSFRNARMGVSWIRQPPGKCLEWLAHIFSNDEKSYSTSLKSRLTISKDTSKSQVVLTMTNMDPVDTATYFCARVPEYSSGWYRFDYWGQGTLVTVSSGGGGSGGGGSGGGGSDIQMTQSPSSLSASVGDRVTISCRASQSIRSYLNWYQQKPGKAPKLLIYATSSLQGGVPSRFSGSGSGTDFTLTISSLQPEDFATYYCQQSYSTPFTFGCGTKVEIK

SEQ ID NO: 404 - protein, 1500 aa, Synthetic construct
QVQLVQSGAEVKKPGASVKVSCKASGYTFTDYYMHWVRQAPGQCLEWMGWINPNSGGPNYAQKFQGRVTMTRDTSISTAHMELSRLRSDDTAVYYCAREKHAVAGIGFDYWGQGTLVTVSSGGGGSGGGGSGGGGSDIQMTQSPSSVSASVGDRVTITCQASQDISNYLNWYQQKPGKAPKLLIYAASSLESGVPSRFSGSGSGTDFTLTISSLQPEDFATYYCQQANSFPLTFGCGTKVDIKSGGGGSQVTLKESGPTLVKPTETLTLTCTVSGFSFRNARMGVSWIRQPPGKCLEWLAHIFSNDEKSYSTSLKSRLTISKDTSKSQVVLTMTNMDPVDTATYFCARVPEYSSGWYRFDYWGQGTLVTVSSGGGGSGGGGSGGGGSDIQMTQSPSSLSASVGDRVTISCRASQSIRSYLNWYQQKPGKAPKLLIYATSSLQGGVPSRFSGSGSGTDFTLTISSLQPEDFATYYCQQSYSTPFTFGCGTKVEIKSGGGGDKTHTCPPCPAPELLGGPSVFLFPPKPKDTLMISRTPEVTCVVVDVSHEDPEVKFNWYVDGVEVHNAKTKPCEEQYGSTYRCVSVLTVLHQDWLNGKEYKCKVSNKALPAPIEKTISKAKGQPREPQVYTLPPSREEMTKNQVSLTCLVKGFYPSDIAVEWESNGQPENNYKTTPPVLDSDGSFFLYSKLTVDKSRWQQGNVFSCSVMHEALHNHYTQKSLSLSPGKGGGGSGGGGSGGGGSGGGGSGGGGSGGGGSDKTHTCPPCPAPELLGGPSVFLFPPKPKDTLMISRTPEVTCVVVDVSHEDPEVKFNWYVDGVEVHNAKTKPCEEQYGSTYRCVSVLTVLHQDWLNGKEYKCKVSNKALPAPIEKTISKAKGQPREPQVYTLPPSREEMTKNQVSLTCLVKGFYPSDIAVEWESNGQPENNYKTTPPVLDSDGSFFLYSKLTVDKSRWQQGNVFSCSVMHEALHNHYTQKSLSLSPGKGGGGEVQLVESGGGLVQPGGSLKLSCAASGFTFNKYAMNWVRQAPGKCLEWVARIRSKYNNYATYYADSVKDRFTISRDDSKNTAYLQMNNLKTEDTAVYYCVRHGNFGNSYISYWAYWGQGTLVTVSSGGGGSGGGGSGGGGSQTVVTQEPSLTVSPGGTVTLTCGSSTGAVTSGNYPNWVQQKPGQAPRGLIGGTKFLAPGTPARFSGSLLGGKAALTLSGVQPEDEAEYYCVLWYSNRWVFGCGTKLTVLGGGGSGGGGSGGGGSEVQLVESGGGLVQPGGSLKLSCAASGFTFNKYAMNWVRQAPGKCLEWVARIRSKYNNYATYYADSVKDRFTISRDDSKNTAYLQMNNLKTEDTAVYYCVRHGNFGNSYISYWAYWGQGTLVTVSSGGGGSGGGGSGGGGSQTVVTQEPSLTVSPGGTVTLTCGSSTGAVTSGNYPNWVQQKPGQAPRGLIGGTKFLAPGTPARFSGSLLGGKAALTLSGVQPEDEAEYYCVLWYSNRWVFGCGTKLTVL

SEQ ID NO: 405 - protein, 1490 aa, Synthetic construct
QVQLVQSGAEVKKPGASVKVSCKASGYTFTDYYMHWVRQAPGQCLEWMGWINPNSGGPNYAQKFQGRVTMTRDTSISTAHMELSRLRSDDTAVYYCAREKHAVAGIGFDYWGQGTLVTVSSGGGGSGGGGSGGGGSDIQMTQSPSSVSASVGDRVTITCQASQDISNYLNWYQQKPGKAPKLLIYAASSLESGVPSRFSGSGSGTDFTLTISSLQPEDFATYYCQQANSFPLTFGCGTKVDIKSGGGGSQVTLKESGPTLVKPTETLTLTCTVSGFSFRNARMGVSWIRQPPGKCLEWLAHIFSNDEKSYSTSLKSRLTISKDTSKSQVVLTMTNMDPVDTATYFCARVPEYSSGWYRFDYWGQGTLVTVSSGGGGSGGGGSGGGGSDIQMTQSPSSLSASVGDRVTISCRASQSIRSYLNWYQQKPGKAPKLLIYATSSLQGGVPSRFSGSGSGTDFTLTISSLQPEDFATYYCQQSYSTPFTFGCGTKVEIKSGGGGSEVQLVESGGGLVQPGGSLKLSCAASGFTFNKYAMNWVRQAPGKCLEWVARIRSKYNNYATYYADSVKDRFTISRDDSKNTAYLQMNNLKTEDTAVYYCVRHGNFGNSYISYWAYWGQGTLVTVSSGGGGSGGGGSGGGGSQTVVTQEPSLTVSPGGTVTLTCGSSTGAVTSGNYPNWVQQKPGQAPRGLIGGTKFLAPGTPARFSGSLLGGKAALTLSGVQPEDEAEYYCVLWYSNRWVFGCGTKLTVLGGGGDKTHTCPPCPAPELLGGPSVFLFPPKPKDTLMISRTPEVTCVVVDVSHEDPEVKFNWYVDGVEVHNAKTKPCEEQYGSTYRCVSVLTVLHQDWLNGKEYKCKVSNKALPAPIEKTISKAKGQPREPQVYTLPPSREEMTKNQVSLTCLVKGFYPSDIAVEWESNGQPENNYKTTPPVLDSDGSFFLYSKLTVDKSRWQQGNVFSCSVMHEALHNHYTQKSLSLSPGKGGGGSGGGGSGGGGSGGGGSGGGGSGGGGSDKTHTCPPCPAPELLGGPSVFLFPPKPKDTLMISRTPEVTCVVVDVSHEDPEVKFNWYVDGVEVHNAKTKPCEEQYGSTYRCVSVLTVLHQDWLNGKEYKCKVSNKALPAPIEKTISKAKGQPREPQVYTLPPSREEMTKNQVSLTCLVKGFYPSDIAVEWESNGQPENNYKTTPPVLDSDGSFFLYSKLTVDKSRWQQGNVFSCSVMHEALHNHYTQKSLSLSPGKGGGGEVQLVESGGGLVQPGGSLKLSCAASGFTFNKYAMNWVRQAPGKCLEWVARIRSKYNNYATYYADSVKDRFTISRDDSKNTAYLQMNNLKTEDTAVYYCVRHGNFGNSYISYWAYWGQGTLVTVSSGGGGSGGGGSGGGGSQTVVTQEPSLTVSPGGTVTLTCGSSTGAVTSGNYPNWVQQKPGQAPRGLIGGTKFLAPGTPARFSGSLLGGKAALTLSGVQPEDEAEYYCVLWYSNRWVFGCGTKLTVL

SEQ ID NO: 406 - protein, 1501 aa, Synthetic construct
QVQLVQSGAEVKKPGASVKVSCKASGYTFTDYYMHWVRQAPGQCLEWMGWINPNSGGPNYAQKFQGRVTMTRDTSISTAHMELSRLRSDDTAVYYCAREKHAVAGIGFDYWGQGTLVTVSSGGGGSGGGGSGGGGSDIQMTQSPSSVSASVGDRVTITCQASQDISNYLNWYQQKPGKAPKLLIYAASSLESGVPSRFSGSGSGTDFTLTISSLQPEDFATYYCQQANSFPLTFGCGTKVDIKSGGGGSQVTLKESGPTLVKPTETLTLTCTVSGFSFRNARMGVSWIRQPPGKCLEWLAHIFSNDEKSYSTSLKSRLTISKDTSKSQVVLTMTNMDPVDTATYFCARVPEYSSGWYRFDYWGQGTLVTVSSGGGGSGGGGSGGGGSDIQMTQSPSSLSASVGDRVTISCRASQSIRSYLNWYQQKPGKAPKLLIYATSSLQGGVPSRFSGSGSGTDFTLTISSLQPEDFATYYCQQSYSTPFTFGCGTKVEIKSGGGGSEVQLVESGGGLVQPGGSLKLSCAASGFTFNKYAMNWVRQAPGKCLEWVARIRSKYNNYATYYADSVKDRFTISRDDSKNTAYLQMNNLKTEDTAVYYCVRHGNFGNSYISYWAYWGQGTLVTVSSGGGGSGGGGSGGGGSQTVVTQEPSLTVSPGGTVTLTCGSSTGAVTSGNYPNWVQQKPGQAPRGLIGGTKFLAPGTPARFSGSLLGGKAALTLSGVQPEDEAEYYCVLWYSNRWVFGCGTKLTVLGGGGSGGGGSGGGGSEVQLVESGGGLVQPGGSLKLSCAASGFTFNKYAMNWVRQAPGKCLEWVARIRSKYNNYATYYADSVKDRFTISRDDSKNTAYLQMNNLKTEDTAVYYCVRHGNFGNSYISYWAYWGQGTLVTVSSGGGGSGGGGSGGGGSQTVVTQEPSLTVSPGGTVTLTCGSSTGAVTSGNYPNWVQQKPGQAPRGLIGGTKFLAPGTPARFSGSLLGGKAALTLSGVQPEDEAEYYCVLWYSNRWVFGCGTKLTVLGGGGDKTHTCPPCPAPELLGGPSVFLFPPKPKDTLMISRTPEVTCVVVDVSHEDPEVKFNWYVDGVEVHNAKTKPCEEQYGSTYRCVSVLTVLHQDWLNGKEYKCKVSNKALPAPIEKTISKAKGQPREPQVYTLPPSREEMTKNQVSLTCLVKGFYPSDIAVEWESNGQPENNYKTTPPVLDSDGSFFLYSKLTVDKSRWQQGNVFSCSVMHEALHNHYTQKSLSLSPGKGGGGSGGGGSGGGGSGGGGSGGGGSGGGGSDKTHTCPPCPAPELLGGPSVFLFPPKPKDTLMISRTPEVTCVVVDVSHEDPEVKFNWYVDGVEVHNAKTKPCEEQYGSTYRCVSVLTVLHQDWLNGKEYKCKVSNKALPAPIEKTISKAKGQPREPQVYTLPPSREEMTKNQVSLTCLVKGFYPSDIAVEWESNGQPENNYKTTPPVLDSDGSFFLYSKLTVDKSRWQQGNVFSCSVMHEALHNHYTQKSLSLSPGK

SEQ ID NO: 407 - protein, 1490 aa, Synthetic construct
QVQLVQSGAEVKKPGASVKVSCKASGYTFTDYYMHWVRQAPGQCLEWMGWINPNSGGPNYAQKFQGRVTMTRDTSISTAHMELSRLRSDDTAVYYCAREKHAVAGIGFDYWGQGTLVTVSSGGGGSGGGGSGGGGSDIQMTQSPSSVSASVGDRVTITCQASQDISNYLNWYQQKPGKAPKLLIYAASSLESGVPSRFSGSGSGTDFTLTISSLQPEDFATYYCQQANSFPLTFGCGTKVDIKSGGGGSEVQLVESGGGLVQPGGSLKLSCAASGFTFNKYAMNWVRQAPGKCLEWVARIRSKYNNYATYYADSVKDRFTISRDDSKNTAYLQMNNLKTEDTAVYYCVRHGNFGNSYISYWAYWGQGTLVTVSSGGGGSGGGGSGGGGSQTVVTQEPSLTVSPGGTVTLTCGSSTGAVTSGNYPNWVQQKPGQAPRGLIGGTKFLAPGTPARFSGSLLGGKAALTLSGVQPEDEAEYYCVLWYSNRWVFGCGTKLTVLGGGGDKTHTCPPCPAPELLGGPSVFLFPPKPKDTLMISRTPEVTCVVVDVSHEDPEVKFNWYVDGVEVHNAKTKPCEEQYGSTYRCVSVLTVLHQDWLNGKEYKCKVSNKALPAPIEKTISKAKGQPREPQVYTLPPSREEMTKNQVSLTCLVKGFYPSDIAVEWESNGQPENNYKTTPPVLDSDGSFFLYSKLTVDKSRWQQGNVFSCSVMHEALHNHYTQKSLSLSPGKGGGGSGGGGSGGGGSGGGGSGGGGSGGGGSDKTHTCPPCPAPELLGGPSVFLFPPKPKDTLMISRTPEVTCVVVDVSHEDPEVKFNWYVDGVEVHNAKTKPCEEQYGSTYRCVSVLTVLHQDWLNGKEYKCKVSNKALPAPIEKTISKAKGQPREPQVYTLPPSREEMTKNQVSLTCLVKGFYPSDIAVEWESNGQPENNYKTTPPVLDSDGSFFLYSKLTVDKSRWQQGNVFSCSVMHEALHNHYTQKSLSLSPGKGGGGQVTLKESGPTLVKPTETLTLTCTVSGFSFRNARMGVSWIRQPPGKCLEWLAHIFSNDEKSYSTSLKSRLTISKDTSKSQVVLTMTNMDPVDTATYFCARVPEYSSGWYRFDYWGQGTLVTVSSGGGGSGGGGSGGGGSDIQMTQSPSSLSASVGDRVTISCRASQSIRSYLNWYQQKPGKAPKLLIYATSSLQGGVPSRFSGSGSGTDFTLTISSLQPEDFATYYCQQSYSTPFTFGCGTKVEIKSGGGGSEVQLVESGGGLVQPGGSLKLSCAASGFTFNKYAMNWVRQAPGKCLEWVARIRSKYNNYATYYADSVKDRFTISRDDSKNTAYLQMNNLKTEDTAVYYCVRHGNFGNSYISYWAYWGQGTLVTVSSGGGGSGGGGSGGGGSQTVVTQEPSLTVSPGGTVTLTCGSSTGAVTSGNYPNWVQQKPGQAPRGLIGGTKFLAPGTPARFSGSLLGGKAALTLSGVQPEDEAEYYCVLWYSNRWVFGCGTKLTVL

SEQ ID NO: 408 - protein, 1499 aa, Synthetic construct
QVQLVQSGAEVKKPGASVKVSCKASGYTFTDYYMHWVRQAPGQCLEWMGWINPNSGGPNYAQKFQGRVTMTRDTSISTAHMELSRLRSDDTAVYYCAREKHAVAGIGFDYWGQGTLVTVSSGGGGSGGGGSGGGGSDIQMTQSPSSVSASVGDRVTITCQASQDISNYLNWYQQKPGKAPKLLIYAASSLESGVPSRFSGSGSGTDFTLTISSLQPEDFATYYCQQANSFPLTFGCGTKVDIKGGGGDKTHTCPPCPAPELLGGPSVFLFPPKPKDTLMISRTPEVTCVVVDVSHEDPEVKFNWYVDGVEVHNAKTKPCEEQYGSTYRCVSVLTVLHQDWLNGKEYKCKVSNKALPAPIEKTISKAKGQPREPQVYTLPPSREEMTKNQVSLTCLVKGFYPSDIAVEWESNGQPENNYKTTPPVLDSDGSFFLYSKLTVDKSRWQQGNVFSCSVMHEALHNHYTQKSLSLSPGKGGGGSGGGGSGGGGSGGGGSGGGGSGGGGSDKTHTCPPCPAPELLGGPSVFLFPPKPKDTLMISRTPEVTCVVVDVSHEDPEVKFNWYVDGVEVHNAKTKPCEEQYGSTYRCVSVLTVLHQDWLNGKEYKCKVSNKALPAPIEKTISKAKGQPREPQVYTLPPSREEMTKNQVSLTCLVKGFYPSDIAVEWESNGQPENNYKTTPPVLDSDGSFFLYSKLTVDKSRWQQGNVFSCSVMHEALHNHYTQKSLSLSPGKGGGGQVTLKESGPTLVKPTETLTLTCTVSGFSFRNARMGVSWIRQPPGKCLEWLAHIFSNDEKSYSTSLKSRLTISKDTSKSQVVLTMTNMDPVDTATYFCARVPEYSSGWYRFDYWGQGTLVTVSSGGGGSGGGGSGGGGSDIQMTQSPSSLSASVGDRVTISCRASQSIRSYLNWYQQKPGKAPKLLIYATSSLQGGVPSRFSGSGSGTDFTLTISSLQPEDFATYYCQQSYSTPFTFGCGTKVEIKSGGGGSEVQLVESGGGLVQPGGSLKLSCAASGFTFNKYAMNWVRQAPGKCLEWVARIRSKYNNYATYYADSVKDRFTISRDDSKNTAYLQMNNLKTEDTAVYYCVRHGNFGNSYISYWAYWGQGTLVTVSSGGGGSGGGGSGGGGSQTVVTQEPSLTVSPGGTVTLTCGSSTGAVTSGNYPNWVQQKPGQAPRGLIGGTKFLAPGTPARFSGSLLGGKAALTLSGVQPEDEAEYYCVLWYSNRWVFGCGTKLTVLGGGGSGGGGSGGGGSEVQLVESGGGLVQPGGSLKLSCAASGFTFNKYAMNWVRQAPGKCLEWVARIRSKYNNYATYYADSVKDRFTISRDDSKNTAYLQMNNLKTEDTAVYYCVRHGNFGNSYISYWAYWGQGTLVTVSSGGGGSGGGGSGGGGSQTVVTQEPSLTVSPGGTVTLTCGSSTGAVTSGNYPNWVQQKPGQAPRGLIGGTKFLAPGTPARFSGSLLGGKAALTLSGVQPEDEAEYYCVLWYSNRWVFGCGTKLTVL

SEQ ID NO: 409 - protein, 1582 aa, Synthetic construct
QVQLVQSGAEVKKPGASVKVSCKASGYTFTDYYMHWVRQAPGQCLEWMGWINPNSGGPNYAQKFQGRVTMTRDTSISTAHMELSRLRSDDTAVYYCAREKHAVAGIGFDYWGQGTLVTVSSGGGGSGGGGSGGGGSDIQMTQSPSSVSASVGDRVTITCQASQDISNYLNWYQQKPGKAPKLLIYAASSLESGVPSRFSGSGSGTDFTLTISSLQPEDFATYYCQQANSFPLTFGCGTKVDIKSGEAAAKEAAAKEAAAKEAAAKEAAAKEAAAKEAAAKEAAAKEAAAKEAAAKEVQLVESGGGLVQPGGSLKLSCAASGFTFNKYAMNWVRQAPGKCLEWVARIRSKYNNYATYYADSVKDRFTISRDDSKNTAYLQMNNLKTEDTAVYYCVRHGNFGNSYISYWAYWGQGTLVTVSSGGGGSGGGGSGGGGSQTVVTQEPSLTVSPGGTVTLTCGSSTGAVTSGNYPNWVQQKPGQAPRGLIGGTKFLAPGTPARFSGSLLGGKAALTLSGVQPEDEAEYYCVLWYSNRWVFGCGTKLTVLGGGGDKTHTCPPCPAPELLGGPSVFLFPPKPKDTLMISRTPEVTCVVVDVSHEDPEVKFNWYVDGVEVHNAKTKPCEEQYGSTYRCVSVLTVLHQDWLNGKEYKCKVSNKALPAPIEKTISKAKGQPREPQVYTLPPSREEMTKNQVSLTCLVKGFYPSDIAVEWESNGQPENNYKTTPPVLDSDGSFFLYSKLTVDKSRWQQGNVFSCSVMHEALHNHYTQKSLSLSPGKGGGGSGGGGSGGGGSGGGGSGGGGSGGGGSDKTHTCPPCPAPELLGGPSVFLFPPKPKDTLMISRTPEVTCVVVDVSHEDPEVKFNWYVDGVEVHNAKTKPCEEQYGSTYRCVSVLTVLHQDWLNGKEYKCKVSNKALPAPIEKTISKAKGQPREPQVYTLPPSREEMTKNQVSLTCLVKGFYPSDIAVEWESNGQPENNYKTTPPVLDSDGSFFLYSKLTVDKSRWQQGNVFSCSVMHEALHNHYTQKSLSLSPGKGGGGQVTLKESGPTLVKPTETLTLTCTVSGFSFRNARMGVSWIRQPPGKCLEWLAHIFSNDEKSYSTSLKSRLTISKDTSKSQVVLTMTNMDPVDTATYFCARVPEYSSGWYRFDYWGQGTLVTVSSGGGGSGGGGSGGGGSDIQMTQSPSSLSASVGDRVTISCRASQSIRSYLNWYQQKPGKAPKLLIYATSSLQGGVPSRFSGSGSGTDFTLTISSLQPEDFATYYCQQSYSTPFTFGCGTKVEIKSGEAAAKEAAAKEAAAKEAAAKEAAAKEAAAKEAAAKEAAAKEAAAKEAAAKEVQLVESGGGLVQPGGSLKLSCAASGFTFNKYAMNWVRQAPGKCLEWVARIRSKYNNYATYYADSVKDRFTISRDDSKNTAYLQMNNLKTEDTAVYYCVRHGNFGNSYISYWAYWGQGTLVTVSSGGGGSGGGGSGGGGSQTVVTQEPSLTVSPGGTVTLTCGSSTGAVTSGNYPNWVQQKPGQAPRGLIGGTKFLAPGTPARFSGSLLGGKAALTLSGVQPEDEAEYYCVLWYSNRWVFGCGTKLTVL

SEQ ID NO: 410 - protein, 1510 aa, Synthetic construct
QVQLVQSGAEVKKPGASVKVSCKASGYTFTDYYMHWVRQAPGQCLEWMGWINPNSGGPNYAQKFQGRVTMTRDTSISTAHMELSRLRSDDTAVYYCAREKHAVAGIGFDYWGQGTLVTVSSGGGGSGGGGSGGGGSDIQMTQSPSSVSASVGDRVTITCQASQDISNYLNWYQQKPGKAPKLLIYAASSLESGVPSRFSGSGSGTDFTLTISSLQPEDFATYYCQQANSFPLTFGCGTKVDIKSGGGGSGGGGSGGGGSEVQLVESGGGLVQPGGSLKLSCAASGFTFNKYAMNWVRQAPGKCLEWVARIRSKYNNYATYYADSVKDRFTISRDDSKNTAYLQMNNLKTEDTAVYYCVRHGNFGNSYISYWAYWGQGTLVTVSSGGGGSGGGGSGGGGSQTVVTQEPSLTVSPGGTVTLTCGSSTGAVTSGNYPNWVQQKPGQAPRGLIGGTKFLAPGTPARFSGSLLGGKAALTLSGVQPEDEAEYYCVLWYSNRWVFGCGTKLTVLGGGGDKTHTCPPCPAPELLGGPSVFLFPPKPKDTLMISRTPEVTCVVVDVSHEDPEVKFNWYVDGVEVHNAKTKPCEEQYGSTYRCVSVLTVLHQDWLNGKEYKCKVSNKALPAPIEKTISKAKGQPREPQVYTLPPSREEMTKNQVSLTCLVKGFYPSDIAVEWESNGQPENNYKTTPPVLDSDGSFFLYSKLTVDKSRWQQGNVFSCSVMHEALHNHYTQKSLSLSPGKGGGGSGGGGSGGGGSGGGGSGGGGSGGGGSDKTHTCPPCPAPELLGGPSVFLFPPKPKDTLMISRTPEVTCVVVDVSHEDPEVKFNWYVDGVEVHNAKTKPCEEQYGSTYRCVSVLTVLHQDWLNGKEYKCKVSNKALPAPIEKTISKAKGQPREPQVYTLPPSREEMTKNQVSLTCLVKGFYPSDIAVEWESNGQPENNYKTTPPVLDSDGSFFLYSKLTVDKSRWQQGNVFSCSVMHEALHNHYTQKSLSLSPGKGGGGQVTLKESGPTLVKPTETLTLTCTVSGFSFRNARMGVSWIRQPPGKCLEWLAHIFSNDEKSYSTSLKSRLTISKDTSKSQVVLTMTNMDPVDTATYFCARVPEYSSGWYRFDYWGQGTLVTVSSGGGGSGGGGSGGGGSDIQMTQSPSSLSASVGDRVTISCRASQSIRSYLNWYQQKPGKAPKLLIYATSSLQGGVPSRFSGSGSGTDFTLTISSLQPEDFATYYCQQSYSTPFTFGCGTKVEIKSGGGGSGGGGSGGGGSEVQLVESGGGLVQPGGSLKLSCAASGFTFNKYAMNWVRQAPGKCLEWVARIRSKYNNYATYYADSVKDRFTISRDDSKNTAYLQMNNLKTEDTAVYYCVRHGNFGNSYISYWAYWGQGTLVTVSSGGGGSGGGGSGGGGSQTVVTQEPSLTVSPGGTVTLTCGSSTGAVTSGNYPNWVQQKPGQAPRGLIGGTKFLAPGTPARFSGSLLGGKAALTLSGVQPEDEAEYYCVLWYSNRWVFGCGTKLTVL

SEQ ID NO: 411 - protein, 994 aa, Synthetic construct
EVQLLESGGGLVQPGGSLRLSCAASGFSFSSYPINWVRQAPGKGLEWVGVIWTGGGTNYASSVKGRFTISRDNSKNTVYLQMNSLRAEDTAVYYCAKSRGVYDFDGRGAMDYWGQGTLVTVSSGGGGSGGGGSGGGGSDIVMTQSPDSLAVSLGERATINCKSSQSLLYSSNQKNYFAWYQQKPGQPPKLLIYWASTRESGVPDRFSGSGSGTDFTLTISSLQAEDVAVYYCQQYYSYPYTFGQGTKLEIKSGGGGSEVQLVESGGGLVQPGGSLKLSCAASGFTFNKYAMNWVRQAPGKGLEWVARIRSKYNNYATYYADSVKDRFTISRDDSKNTAYLQMNNLKTEDTAVYYCVRHGNFGNSYISYWAYWGQGTLVTVSSGGGGSGGGGSGGGGSQTVVTQEPSLTVSPGGTVTLTCGSSTGAVTSGNYPNWVQQKPGQAPRGLIGGTKFLAPGTPARFSGSLLGGKAALTLSGVQPEDEAEYYCVLWYSNRWVFGGGTKLTVLGGGGDKTHTCPPCPAPELLGGPSVFLFPPKPKDTLMISRTPEVTCVVVDVSHEDPEVKFNWYVDGVEVHNAKTKPCEEQYGSTYRCVSVLTVLHQDWLNGKEYKCKVSNKALPAPIEKTISKAKGQPREPQVYTLPPSREEMTKNQVSLTCLVKGFYPSDIAVEWESNGQPENNYKTTPPVLDSDGSFFLYSKLTVDKSRWQQGNVFSCSVMHEALHNHYTQKSLSLSPGKGGGGSGGGGSGGGGSGGGGSGGGGSGGGGSDKTHTCPPCPAPELLGGPSVFLFPPKPKDTLMISRTPEVTCVVVDVSHEDPEVKFNWYVDGVEVHNAKTKPCEEQYGSTYRCVSVLTVLHQDWLNGKEYKCKVSNKALPAPIEKTISKAKGQPREPQVYTLPPSREEMTKNQVSLTCLVKGFYPSDIAVEWESNGQPENNYKTTPPVLDSDGSFFLYSKLTVDKSRWQQGNVFSCSVMHEALHNHYTQKSLSLSPGK

SEQ ID NO: 412 - protein, 986 aa, Synthetic construct
QVQLVQSGAEVKKPGASVKVSCKASGYTFTDYYMHWVRQAPGQCLEWMGWINPNSGGPNYAQKFQGRVTMTRDTSISTAHMELSRLRSDDTAVYYCAREKHAVAGIGFDYWGQGTLVTVSSGGGGSGGGGSGGGGSDIQMTQSPSSVSASVGDRVTITCQASQDISNYLNWYQQKPGKAPKLLIYAASSLESGVPSRFSGSGSGTDFTLTISSLQPEDFATYYCQQANSFPLTFGCGTKVDIKSGGGGSEVQLVESGGGLVQPGGSLKLSCAASGFTFNKYAMNWVRQAPGKGLEWVARIRSKYNNYATYYADSVKDRFTISRDDSKNTAYLQMNNLKTEDTAVYYCVRHGNFGNSYISYWAYWGQGTLVTVSSGGGGSGGGGSGGGGSQTVVTQEPSLTVSPGGTVTLTCGSSTGAVTSGNYPNWVQQKPGQAPRGLIGGTKFLAPGTPARFSGSLLGGKAALTLSGVQPEDEAEYYCVLWYSNRWVFGGGTKLTVLGGGGDKTHTCPPCPAPELLGGPSVFLFPPKPKDTLMISRTPEVTCVVVDVSHEDPEVKFNWYVDGVEVHNAKTKPCEEQYGSTYRCVSVLTVLHQDWLNGKEYKCKVSNKALPAPIEKTISKAKGQPREPQVYTLPPSREEMTKNQVSLTCLVKGFYPSDIAVEWESNGQPENNYKTTPPVLDSDGSFFLYSKLTVDKSRWQQGNVFSCSVMHEALHNHYTQKSLSLSPGKGGGGSGGGGSGGGGSGGGGSGGGGSGGGGSDKTHTCPPCPAPELLGGPSVFLFPPKPKDTLMISRTPEVTCVVVDVSHEDPEVKFNWYVDGVEVHNAKTKPCEEQYGSTYRCVSVLTVLHQDWLNGKEYKCKVSNKALPAPIEKTISKAKGQPREPQVYTLPPSREEMTKNQVSLTCLVKGFYPSDIAVEWESNGQPENNYKTTPPVLDSDGSFFLYSKLTVDKSRWQQGNVFSCSVMHEALHNHYTQKSLSLSPGK

SEQ ID NO: 413 - protein, 1235 aa, Synthetic construct
QVQLVQSGAEVKKPGASVKVSCKASGYTFTDYYMHWVRQAPGQCLEWMGWINPNSGGPNYAQKFQGRVTMTRDTSISTAHMELSRLRSDDTAVYYCAREKHAVAGIGFDYWGQGTLVTVSSGGGGSGGGGSGGGGSDIQMTQSPSSVSASVGDRVTITCQASQDISNYLNWYQQKPGKAPKLLIYAASSLESGVPSRFSGSGSGTDFTLTISSLQPEDFATYYCQQANSFPLTFGCGTKVDIKSGGGGSQVQLVESGGGLVKPGESLRLSCAASGFTFSDYYMYWVRQAPGKGLEWVAIISDGGYYTYYSDIIKGRFTISRDNAKNSLYLQMNSLKAEDTAVYYCARGFPLLRHGAMDYWGQGTLVTVSSGGGGSGGGGSGGGGSDIQMTQSPSSLSASVGDRVTITCKASQNVDTNVAWYQQKPGQAPKSLIYSASYRYSDVPSRFSGSASGTDFTLTISSVQSEDFATYYCQQYDSYPYTFGGGTKLEIKSGGGGSEVQLVESGGGLVQPGGSLKLSCAASGFTFNKYAMNWVRQAPGKGLEWVARIRSKYNNYATYYADSVKDRFTISRDDSKNTAYLQMNNLKTEDTAVYYCVRHGNFGNSYISYWAYWGQGTLVTVSSGGGGSGGGGSGGGGSQTVVTQEPSLTVSPGGTVTLTCGSSTGAVTSGNYPNWVQQKPGQAPRGLIGGTKFLAPGTPARFSGSLLGGKAALTLSGVQPEDEAEYYCVLWYSNRWVFGGGTKLTVLGGGGDKTHTCPPCPAPELLGGPSVFLFPPKPKDTLMISRTPEVTCVVVDVSHEDPEVKFNWYVDGVEVHNAKTKPCEEQYGSTYRCVSVLTVLHQDWLNGKEYKCKVSNKALPAPIEKTISKAKGQPREPQVYTLPPSREEMTKNQVSLTCLVKGFYPSDIAVEWESNGQPENNYKTTPPVLDSDGSFFLYSKLTVDKSRWQQGNVFSCSVMHEALHNHYTQKSLSLSPGKGGGGSGGGGSGGGGSGGGGSGGGGSGGGGSDKTHTCPPCPAPELLGGPSVFLFPPKPKDTLMISRTPEVTCVVVDVSHEDPEVKFNWYVDGVEVHNAKTKPCEEQYGSTYRCVSVLTVLHQDWLNGKEYKCKVSNKALPAPIEKTISKAKGQPREPQVYTLPPSREEMTKNQVSLTCLVKGFYPSDIAVEWESNGQPENNYKTTPPVLDSDGSFFLYSKLTVDKSRWQQGNVFSCSVMHEALHNHYTQKSLSLSPGK

SEQ ID NO: 414 - protein, 994 aa, Synthetic construct
QVQLVESGGGVVQSGRSLRLSCAASGFTFRNYGMHWVRQAPGKCLEWVAVIWYDGSDKYYADSVRGRFTISRDNSKNTLYLQMNSLRAEDTAVYYCARDGYDILTGNPRDFDYWGQGTLVTVSSGGGGSGGGGSGGGGSDTVMTQTPLSSHVTLGQPASISCRSSQSLVHSDGNTYLSWLQQRPGQPPRLLIYRISRRFSGVPDRFSGSGAGTDFTLEISRVEAEDVGVYYCMQSTHVPRTFGCGTKVEIKSGGGGSEVQLVESGGGLVQPGGSLKLSCAASGFTFNKYAMNWVRQAPGKGLEWVARIRSKYNNYATYYADSVKDRFTISRDDSKNTAYLQMNNLKTEDTAVYYCVRHGNFGNSYISYWAYWGQGTLVTVSSGGGGSGGGGSGGGGSQTVVTQEPSLTVSPGGTVTLTCGSSTGAVTSGNYPNWVQQKPGQAPRGLIGGTKFLAPGTPARFSGSLLGGKAALTLSGVQPEDEAEYYCVLWYSNRWVFGGGTKLTVLGGGGDKTHTCPPCPAPELLGGPSVFLFPPKPKDTLMISRTPEVTCVVVDVSHEDPEVKFNWYVDGVEVHNAKTKPCEEQYGSTYRCVSVLTVLHQDWLNGKEYKCKVSNKALPAPIEKTISKAKGQPREPQVYTLPPSREEMTKNQVSLTCLVKGFYPSDIAVEWESNGQPENNYKTTPPVLDSDGSFFLYSKLTVDKSRWQQGNVFSCSVMHEALHNHYTQKSLSLSPGKGGGGSGGGGSGGGGSGGGGSGGGGSGGGGSDKTHTCPPCPAPELLGGPSVFLFPPKPKDTLMISRTPEVTCVVVDVSHEDPEVKFNWYVDGVEVHNAKTKPCEEQYGSTYRCVSVLTVLHQDWLNGKEYKCKVSNKALPAPIEKTISKAKGQPREPQVYTLPPSREEMTKNQVSLTCLVKGFYPSDIAVEWESNGQPENNYKTTPPVLDSDGSFFLYSKLTVDKSRWQQGNVFSCSVMHEALHNHYTQKSLSLSPGK

SEQ ID NO: 415 - protein, 990 aa, Synthetic construct
ELVMTQSPSSLTVTAGEKVTMSCKSSQSLLNSGNQKNYLTWYQQKPGQPPKLLIYWASTRESGVPDRFTGSGSGTDFTLTISSVQAEDLAVYYCQNDYSYPLTFGAGTKLEIKGGGGSGGGGSGGGGSEVQLLEQSGAELVRPGTSVKISCKASGYAFTNYWLGWVKQRPGHGLEWIGDIFPGSGNIHYNEKFKGKATLTADKSSSTAYMQLSSLTFEDSAVYFCARLRNWDEPMDYWGQGTTVTVSSGGGGSEVQLVESGGGLVQPGGSLKLSCAASGFTFNKYAMNWVRQAPGKGLEWVARIRSKYNNYATYYADSVKDRFTISRDDSKNTAYLQMNNLKTEDTAVYYCVRHGNFGNSYISYWAYWGQGTLVTVSSGGGGSGGGGSGGGGSQTVVTQEPSLTVSPGGTVTLTCGSSTGAVTSGNYPNWVQQKPGQAPRGLIGGTKFLAPGTPARFSGSLLGGKAALTLSGVQPEDEAEYYCVLWYSNRWVFGGGTKLTVLGGGGDKTHTCPPCPAPELLGGPSVFLFPPKPKDTLMISRTPEVTCVVVDVSHEDPEVKFNWYVDGVEVHNAKTKPCEEQYGSTYRCVSVLTVLHQDWLNGKEYKCKVSNKALPAPIEKTISKAKGQPREPQVYTLPPSREEMTKNQVSLTCLVKGFYPSDIAVEWESNGQPENNYKTTPPVLDSDGSFFLYSKLTVDKSRWQQGNVFSCSVMHEALHNHYTQKSLSLSPGKGGGGSGGGGSGGGGSGGGGSGGGGSGGGGSDKTHTCPPCPAPELLGGPSVFLFPPKPKDTLMISRTPEVTCVVVDVSHEDPEVKFNWYVDGVEVHNAKTKPCEEQYGSTYRCVSVLTVLHQDWLNGKEYKCKVSNKALPAPIEKTISKAKGQPREPQVYTLPPSREEMTKNQVSLTCLVKGFYPSDIAVEWESNGQPENNYKTTPPVLDSDGSFFLYSKLTVDKSRWQQGNVFSCSVMHEALHNHYTQKSLSLSPGK

SEQ ID NO: 416 - protein, 988 aa, Synthetic construct
QVTLKESGPTLVKPTETLTLTCTVSGFSFRNARMGVSWIRQPPGKCLEWLAHIFSNDEKSYSTSLKSRLTISKDTSKSQVVLTMTNMDPVDTATYFCARVPEYSSGWYRFDYWGQGTLVTVSSGGGGSGGGGSGGGGSDIQMTQSPSSLSASVGDRVTISCRASQSIRSYLNWYQQKPGKAPKLLIYATSSLQGGVPSRFSGSGSGTDFTLTISSLQPEDFATYYCQQSYSTPFTFGCGTKVEIKSGGGGSEVQLVESGGGLVQPGGSLKLSCAASGFTFNKYAMNWVRQAPGKGLEWVARIRSKYNNYATYYADSVKDRFTISRDDSKNTAYLQMNNLKTEDTAVYYCVRHGNFGNSYISYWAYWGQGTLVTVSSGGGGSGGGGSGGGGSQTVVTQEPSLTVSPGGTVTLTCGSSTGAVTSGNYPNWVQQKPGQAPRGLIGGTKFLAPGTPARFSGSLLGGKAALTLSGVQPEDEAEYYCVLWYSNRWVFGGGTKLTVLGGGGDKTHTCPPCPAPELLGGPSVFLFPPKPKDTLMISRTPEVTCVVVDVSHEDPEVKFNWYVDGVEVHNAKTKPCEEQYGSTYRCVSVLTVLHQDWLNGKEYKCKVSNKALPAPIEKTISKAKGQPREPQVYTLPPSREEMTKNQVSLTCLVKGFYPSDIAVEWESNGQPENNYKTTPPVLDSDGSFFLYSKLTVDKSRWQQGNVFSCSVMHEALHNHYTQKSLSLSPGKGGGGSGGGGSGGGGSGGGGSGGGGSGGGGSDKTHTCPPCPAPELLGGPSVFLFPPKPKDTLMISRTPEVTCVVVDVSHEDPEVKFNWYVDGVEVHNAKTKPCEEQYGSTYRCVSVLTVLHQDWLNGKEYKCKVSNKALPAPIEKTISKAKGQPREPQVYTLPPSREEMTKNQVSLTCLVKGFYPSDIAVEWESNGQPENNYKTTPPVLDSDGSFFLYSKLTVDKSRWQQGNVFSCSVMHEALHNHYTQKSLSLSPGK

SEQ ID NO: 417 - protein, 982 aa, Synthetic construct
QVQLVESGGGLVKPGGSLRLSCAASGFTFSDYYMTWIRQAPGKGLEWLSYISSSGSTIYYADSVKGRFTISRDNAKNSLFLQMNSLRAEDTAVYYCARDRNSHFDYWGQGTLVTVSSGGGGSGGGGSGGGGSDIQMTQSPSSVSASVGDRVTITCRASQGINTWLAWYQQKPGKAPKLLIYGASGLQSGVPSRFSGSGSGTDFTLTISSLQPEDFATYYCQQAKSFPRTFGQGTKVEIKSGGGGSEVQLVESGGGLVQPGGSLKLSCAASGFTFNKYAMNWVRQAPGKGLEWVARIRSKYNNYATYYADSVKDRFTISRDDSKNTAYLQMNNLKTEDTAVYYCVRHGNFGNSYISYWAYWGQGTLVTVSSGGGGSGGGGSGGGGSQTVVTQEPSLTVSPGGTVTLTCGSSTGAVTSGNYPNWVQQKPGQAPRGLIGGTKFLAPGTPARFSGSLLGGKAALTLSGVQPEDEAEYYCVLWYSNRWVFGGGTKLTVLGGGGDKTHTCPPCPAPELLGGPSVFLFPPKPKDTLMISRTPEVTCVVVDVSHEDPEVKFNWYVDGVEVHNAKTKPCEEQYGSTYRCVSVLTVLHQDWLNGKEYKCKVSNKALPAPIEKTISKAKGQPREPQVYTLPPSREEMTKNQVSLTCLVKGFYPSDIAVEWESNGQPENNYKTTPPVLDSDGSFFLYSKLTVDKSRWQQGNVFSCSVMHEALHNHYTQKSLSLSPGKGGGGSGGGGSGGGGSGGGGSGGGGSGGGGSDKTHTCPPCPAPELLGGPSVFLFPPKPKDTLMISRTPEVTCVVVDVSHEDPEVKFNWYVDGVEVHNAKTKPCEEQYGSTYRCVSVLTVLHQDWLNGKEYKCKVSNKALPAPIEKTISKAKGQPREPQVYTLPPSREEMTKNQVSLTCLVKGFYPSDIAVEWESNGQPENNYKTTPPVLDSDGSFFLYSKLTVDKSRWQQGNVFSCSVMHEALHNHYTQKSLSLSPGK

SEQ ID NO: 418 - protein, 997 aa, Synthetic construct
EVQLLESGGGVVQPGRSLRLSCAASGFTFSSYGMGWVRQAPGKGLEWVAVISYDGSNKYYADSVKGRFTISRDNSKNTLYLQMNSLRAEDTAVYYCAREGAHFGSGSYYPLYYYYAMDVWGQGTTVTVSSGGGGSGGGGSGGGGSELTLTQSPGTLSLSPGERATLSCRASQSVSSSYLAWYQQKPGQAPRLLIYGASIRATGIPDRFSGSGSGTDFTLTISRLEPEDFAVYYCQQYGSSPIFTFGPGTKVEIKSGGGGSEVQLVESGGGLVQPGGSLKLSCAASGFTFNKYAMNWVRQAPGKGLEWVARIRSKYNNYATYYADSVKDRFTISRDDSKNTAYLQMNNLKTEDTAVYYCVRHGNFGNSYISYWAYWGQGTLVTVSSGGGGSGGGGSGGGGSQTVVTQEPSLTVSPGGTVTLTCGSSTGAVTSGNYPNWVQQKPGQAPRGLIGGTKFLAPGTPARFSGSLLGGKAALTLSGVQPEDEAEYYCVLWYSNRWVFGGGTKLTVLGGGGDKTHTCPPCPAPELLGGPSVFLFPPKPKDTLMISRTPEVTCVVVDVSHEDPEVKFNWYVDGVEVHNAKTKPCEEQYGSTYRCVSVLTVLHQDWLNGKEYKCKVSNKALPAPIEKTISKAKGQPREPQVYTLPPSREEMTKNQVSLTCLVKGFYPSDIAVEWESNGQPENNYKTTPPVLDSDGSFFLYSKLTVDKSRWQQGNVFSCSVMHEALHNHYTQKSLSLSPGKGGGGSGGGGSGGGGSGGGGSGGGGSGGGGSDKTHTCPPCPAPELLGGPSVFLFPPKPKDTLMISRTPEVTCVVVDVSHEDPEVKFNWYVDGVEVHNAKTKPCEEQYGSTYRCVSVLTVLHQDWLNGKEYKCKVSNKALPAPIEKTISKAKGQPREPQVYTLPPSREEMTKNQVSLTCLVKGFYPSDIAVEWESNGQPENNYKTTPPVLDSDGSFFLYSKLTVDKSRWQQGNVFSCSVMHEALHNHYTQKSLSLSPGK

SEQ ID NO: 419 - protein, 1237 aa, Synthetic construct
QVQLVESGGGLVKPGESLRLSCAASGFTFSDYYMYWVRQAPGKGLEWVAIISDGGYYTYYSDIIKGRFTISRDNAKNSLYLQMNSLKAEDTAVYYCARGFPLLRHGAMDYWGQGTLVTVSSGGGGSGGGGSGGGGSDIQMTQSPSSLSASVGDRVTITCKASQNVDTNVAWYQQKPGQAPKSLIYSASYRYSDVPSRFSGSASGTDFTLTISSVQSEDFATYYCQQYDSYPYTFGGGTKLEIKSGGGGSQVTLKESGPTLVKPTETLTLTCTVSGFSFRNARMGVSWIRQPPGKCLEWLAHIFSNDEKSYSTSLKSRLTISKDTSKSQVVLTMTNMDPVDTATYFCARVPEYSSGWYRFDYWGQGTLVTVSSGGGGSGGGGSGGGGSDIQMTQSPSSLSASVGDRVTISCRASQSIRSYLNWYQQKPGKAPKLLIYATSSLQGGVPSRFSGSGSGTDFTLTISSLQPEDFATYYCQQSYSTPFTFGCGTKVEIKSGGGGSEVQLVESGGGLVQPGGSLKLSCAASGFTFNKYAMNWVRQAPGKGLEWVARIRSKYNNYATYYADSVKDRFTISRDDSKNTAYLQMNNLKTEDTAVYYCVRHGNFGNSYISYWAYWGQGTLVTVSSGGGGSGGGGSGGGGSQTVVTQEPSLTVSPGGTVTLTCGSSTGAVTSGNYPNWVQQKPGQAPRGLIGGTKFLAPGTPARFSGSLLGGKAALTLSGVQPEDEAEYYCVLWYSNRWVFGGGTKLTVLGGGGDKTHTCPPCPAPELLGGPSVFLFPPKPKDTLMISRTPEVTCVVVDVSHEDPEVKFNWYVDGVEVHNAKTKPCEEQYGSTYRCVSVLTVLHQDWLNGKEYKCKVSNKALPAPIEKTISKAKGQPREPQVYTLPPSREEMTKNQVSLTCLVKGFYPSDIAVEWESNGQPENNYKTTPPVLDSDGSFFLYSKLTVDKSRWQQGNVFSCSVMHEALHNHYTQKSLSLSPGKGGGGSGGGGSGGGGSGGGGSGGGGSGGGGSDKTHTCPPCPAPELLGGPSVFLFPPKPKDTLMISRTPEVTCVVVDVSHEDPEVKFNWYVDGVEVHNAKTKPCEEQYGSTYRCVSVLTVLHQDWLNGKEYKCKVSNKALPAPIEKTISKAKGQPREPQVYTLPPSREEMTKNQVSLTCLVKGFYPSDIAVEWESNGQPENNYKTTPPVLDSDGSFFLYSKLTVDKSRWQQGNVFSCSVMHEALHNHYTQKSLSLSPGK

SEQ ID NO: 420 - protein, 10 aa, Synthetic construct
GFTFNKYAIN

SEQ ID NO: 421 - protein, 18 aa, Synthetic construct
RIRSKYNNYATYYADQVK

SEQ ID NO: 422 - protein, 14 aa, Synthetic construct
HANFGNSYISYWAY

SEQ ID NO: 423 - protein, 14 aa, Synthetic construct
ASSTGAVTSGNYPN

SEQ ID NO: 424 - protein, 7 aa, Synthetic construct
GTKFLVP

SEQ ID NO: 425 - protein, 9 aa, Synthetic construct
TLWYSNRWV

SEQ ID NO: 426 - protein, 249 aa, Synthetic construct
EVQLVESGGGLVQPGGSLKLSCAASGFTFNKYAINWVRQAPGKGLEWVARIRSKYNNYATYYADQVKDRFTISRDDSKNTAYLQMNNLKTEDTAVYYCVRHANFGNSYISYWAYWGQGTLVTVSSGGGGSGGGGSGGGGSQTVVTQEPSLTVSPGGTVTLTCASSTGAVTSGNYPNWVQQKPGQAPRGLIGGTKFLVPGTPARFSGSLLGGKAALTLSGVQPEDEAEYYCTLWYSNRWVFGGGTKLTVL

SEQ ID NO: 427 - protein, 1613 aa, Synthetic construct
QVQLVQSGAEVKKPGASVKVSCKASGYTFTDYYMHWVRQAPGQCLEWMGWINPNSGGPNYAQKFQGRVTMTRDTSISTAHMELSRLRSDDTAVYYCAREKHAVAGIGFDYWGQGTLVTVSSGGGGSGGGGSGGGGSDIQMTQSPSSVSASVGDRVTITCQASQDISNYLNWYQQKPGKAPKLLIYAASSLESGVPSRFSGSGSGTDFTLTISSLQPEDFATYYCQQANSFPLTFGCGTKVDIKSGGGGSEVQLVESGGGLVQPGGSLKLSCAASGFTFNKYAMNWVRQAPGKCLEWVARIRSKYNNYATYYADSVKDRFTISRDDSKNTAYLQMNNLKTEDTAVYYCVRHGNFGNSYISYWAYWGQGTLVTVSSGGGGSGGGGSGGGGSQTVVTQEPSLTVSPGGTVTLTCGSSTGAVTSGNYPNWVQQKPGQAPRGLIGGTKFLAPGTPARFSGSLLGGKAALTLSGVQPEDEAEYYCVLWYSNRWVFGCGTKLTVLGGGGSGGGGSGGGGSDAHKSEVAHRFKDLGEENFKALVLIAFAQYLQQCPFEDHVKLVNEVTEFAKTCVADESAENCDKSLHTLFGDKLCTVATLRETYGEMADCCAKQEPERNECFLQHKDDNPNLPRLVRPEVDVMCTAFHDNEETFLKKYLYEIARRHPYFYAPELLFFAKRYKAAFTECCQAADKAACLLPKLDELRDEGKASSAKQRLKCASLQKFGERAFKAWAVARLSQRFPKAEFAEVSKLVTDLTKVHTECCHGDLLECADDRADLAKYICENQDSISSKLKECCEKPLLEKSHCIAEVENDEMPADLPSLAADFVESKDVCKNYAEAKDVFLGMFLYEYARRHPDYSVVLLLRLAKTYETTLEKCCAAADPHECYAKVFDEFKPLVEEPQNLIKQNCELFEQLGEYKFQNALLVRYTKKVPQVSTPTLVEVSRNLGKVGSKCCKHPEAKRMPCAEDYLSVVLNQLCVLHEKTPVSDRVTKCCTESLVNRRPCFSALEVDETYVPKEFNAETFTFHADICTLSEKERQIKKQTALVELVKHKPKATKEQLKAVMDDFAAFVEKCCKADDKETCFAEEGKKLVAASQAALGLGGGGSGGGGSGGGGSQVTLKESGPTLVKPTETLTLTCTVSGFSFRNARMGVSWIRQPPGKCLEWLAHIFSNDEKSYSTSLKSRLTISKDTSKSQVVLTMTNMDPVDTATYFCARVPEYSSGWYRFDYWGQGTLVTVSSGGGGSGGGGSGGGGSDIQMTQSPSSLSASVGDRVTISCRASQSIRSYLNWYQQKPGKAPKLLIYATSSLQGGVPSRFSGSGSGTDFTLTISSLQPEDFATYYCQQSYSTPFTFGCGTKVEIKSGGGGSEVQLVESGGGLVQPGGSLKLSCAASGFTFNKYAMNWVRQAPGKCLEWVARIRSKYNNYATYYADSVKDRFTISRDDSKNTAYLQMNNLKTEDTAVYYCVRHGNFGNSYISYWAYWGQGTLVTVSSGGGGSGGGGSGGGGSQTVVTQEPSLTVSPGGTVTLTCGSSTGAVTSGNYPNWVQQKPGQAPRGLIGGTKFLAPGTPARFSGSLLGGKAALTLSGVQPEDEAEYYCVLWYSNRWVFGCGTKLTVL

SEQ ID NO: 428 - protein, 1003 aa, Synthetic construct
QVQLVQSGAEVKKPGASVKVSCKASGYTFTDYYMHWVRQAPGQCLEWMGWINPNSGGPNYAQKFQGRVTMTRDTSISTAHMELSRLRSDDTAVYYCAREKHAVAGIGFDYWGQGTLVTVSSGGGGSGGGGSGGGGSDIQMTQSPSSVSASVGDRVTITCQASQDISNYLNWYQQKPGKAPKLLIYAASSLESGVPSRFSGSGSGTDFTLTISSLQPEDFATYYCQQANSFPLTFGCGTKVDIKSGGGGSEVQLVESGGGLVQPGGSLKLSCAASGFTFNKYAMNWVRQAPGKCLEWVARIRSKYNNYATYYADSVKDRFTISRDDSKNTAYLQMNNLKTEDTAVYYCVRHGNFGNSYISYWAYWGQGTLVTVSSGGGGSGGGGSGGGGSQTVVTQEPSLTVSPGGTVTLTCGSSTGAVTSGNYPNWVQQKPGQAPRGLIGGTKFLAPGTPARFSGSLLGGKAALTLSGVQPEDEAEYYCVLWYSNRWVFGCGTKLTVLGGGGSQVTLKESGPTLVKPTETLTLTCTVSGFSFRNARMGVSWIRQPPGKCLEWLAHIFSNDEKSYSTSLKSRLTISKDTSKSQVVLTMTNMDPVDTATYFCARVPEYSSGWYRFDYWGQGTLVTVSSGGGGSGGGGSGGGGSDIQMTQSPSSLSASVGDRVTISCRASQSIRSYLNWYQQKPGKAPKLLIYATSSLQGGVPSRFSGSGSGTDFTLTISSLQPEDFATYYCQQSYSTPFTFGCGTKVEIKSGGGGSEVQLVESGGGLVQPGGSLKLSCAASGFTFNKYAMNWVRQAPGKCLEWVARIRSKYNNYATYYADSVKDRFTISRDDSKNTAYLQMNNLKTEDTAVYYCVRHGNFGNSYISYWAYWGQGTLVTVSSGGGGSGGGGSGGGGSQTVVTQEPSLTVSPGGTVTLTCGSSTGAVTSGNYPNWVQQKPGQAPRGLIGGTKFLAPGTPARFSGSLLGGKAALTLSGVQPEDEAEYYCVLWYSNRWVFGCGTKLTVL

SEQ ID NO: 429 - protein, 1048 aa, Synthetic construct
QVQLVQSGAEVKKPGASVKVSCKASGYTFTDYYMHWVRQAPGQCLEWMGWINPNSGGPNYAQKFQGRVTMTRDTSISTAHMELSRLRSDDTAVYYCAREKHAVAGIGFDYWGQGTLVTVSSGGGGSGGGGSGGGGSDIQMTQSPSSVSASVGDRVTITCQASQDISNYLNWYQQKPGKAPKLLIYAASSLESGVPSRFSGSGSGTDFTLTISSLQPEDFATYYCQQANSFPLTFGCGTKVDIKSGGGGSEVQLVESGGGLVQPGGSLKLSCAASGFTFNKYAMNWVRQAPGKCLEWVARIRSKYNNYATYYADSVKDRFTISRDDSKNTAYLQMNNLKTEDTAVYYCVRHGNFGNSYISYWAYWGQGTLVTVSSGGGGSGGGGSGGGGSQTVVTQEPSLTVSPGGTVTLTCGSSTGAVTSGNYPNWVQQKPGQAPRGLIGGTKFLAPGTPARFSGSLLGGKAALTLSGVQPEDEAEYYCVLWYSNRWVFGCGTKLTVLEAAAKEAAAKEAAAKEAAAKEAAAKEAAAKEAAAKEAAAKEAAAKEAAAKQVTLKESGPTLVKPTETLTLTCTVSGFSFRNARMGVSWIRQPPGKCLEWLAHIFSNDEKSYSTSLKSRLTISKDTSKSQVVLTMTNMDPVDTATYFCARVPEYSSGWYRFDYWGQGTLVTVSSGGGGSGGGGSGGGGSDIQMTQSPSSLSASVGDRVTISCRASQSIRSYLNWYQQKPGKAPKLLIYATSSLQGGVPSRFSGSGSGTDFTLTISSLQPEDFATYYCQQSYSTPFTFGCGTKVEIKSGGGGSEVQLVESGGGLVQPGGSLKLSCAASGFTFNKYAMNWVRQAPGKCLEWVARIRSKYNNYATYYADSVKDRFTISRDDSKNTAYLQMNNLKTEDTAVYYCVRHGNFGNSYISYWAYWGQGTLVTVSSGGGGSGGGGSGGGGSQTVVTQEPSLTVSPGGTVTLTCGSSTGAVTSGNYPNWVQQKPGQAPRGLIGGTKFLAPGTPARFSGSLLGGKAALTLSGVQPEDEAEYYCVLWYSNRWVFGCGTKLTVL

SEQ ID NO: 430 - protein, 1996 aa, Synthetic construct
QVQLVQSGAEVKKPGASVKVSCKASGYTFTDYYMHWVRQAPGQCLEWMGWINPNSGGPNYAQKFQGRVTMTRDTSISTAHMELSRLRSDDTAVYYCAREKHAVAGIGFDYWGQGTLVTVSSGGGGSGGGGSGGGGSDIQMTQSPSSVSASVGDRVTITCQASQDISNYLNWYQQKPGKAPKLLIYAASSLESGVPSRFSGSGSGTDFTLTISSLQPEDFATYYCQQANSFPLTFGCGTKVDIKSGGGGSEVQLVESGGGLVQPGGSLKLSCAASGFTFNKYAMNWVRQAPGKCLEWVARIRSKYNNYATYYADSVKDRFTISRDDSKNTAYLQMNNLKTEDTAVYYCVRHGNFGNSYISYWAYWGQGTLVTVSSGGGGSGGGGSGGGGSQTVVTQEPSLTVSPGGTVTLTCGSSTGAVTSGNYPNWVQQKPGQAPRGLIGGTKFLAPGTPARFSGSLLGGKAALTLSGVQPEDEAEYYCVLWYSNRWVFGCGTKLTVLGGGGSGGGGSGGGGSDKTHTCPPCPAPELLGGPSVFLFPPKPKDTLMISRTPEVTCVVVDVSHEDPEVKFNWYVDGVEVHNAKTKPCEEQYGSTYRCVSVLTVLHQDWLNGKEYKCKVSNKALPAPIEKTISKAKGQPREPQVYTLPPSREEMTKNQVSLTCLVKGFYPSDIAVEWESNGQPENNYKTTPPVLDSDGSFFLYSKLTVDKSRWQQGNVFSCSVMHEALHNHYTQKSLSLSPGKGGGGSGGGGSGGGGSGGGGSGGGGSGGGGSDKTHTCPPCPAPELLGGPSVFLFPPKPKDTLMISRTPEVTCVVVDVSHEDPEVKFNWYVDGVEVHNAKTKPCEEQYGSTYRCVSVLTVLHQDWLNGKEYKCKVSNKALPAPIEKTISKAKGQPREPQVYTLPPSREEMTKNQVSLTCLVKGFYPSDIAVEWESNGQPENNYKTTPPVLDSDGSFFLYSKLTVDKSRWQQGNVFSCSVMHEALHNHYTQKSLSLSPGKDKTHTCPPCPAPELLGGPSVFLFPPKPKDTLMISRTPEVTCVVVDVSHEDPEVKFNWYVDGVEVHNAKTKPCEEQYGSTYRCVSVLTVLHQDWLNGKEYKCKVSNKALPAPIEKTISKAKGQPREPQVYTLPPSREEMTKNQVSLTCLVKGFYPSDIAVEWESNGQPENNYKTTPPVLDSDGSFFLYSKLTVDKSRWQQGNVFSCSVMHEALHNHYTQKSLSLSPGKGGGGSGGGGSGGGGSGGGGSGGGGSGGGGSDKTHTCPPCPAPELLGGPSVFLFPPKPKDTLMISRTPEVTCVVVDVSHEDPEVKFNWYVDGVEVHNAKTKPCEEQYGSTYRCVSVLTVLHQDWLNGKEYKCKVSNKALPAPIEKTISKAKGQPREPQVYTLPPSREEMTKNQVSLTCLVKGFYPSDIAVEWESNGQPENNYKTTPPVLDSDGSFFLYSKLTVDKSRWQQGNVFSCSVMHEALHNHYTQKSLSLSPGKGGGGSGGGGSGGGGSQVTLKESGPTLVKPTETLTLTCTVSGFSFRNARMGVSWIRQPPGKCLEWLAHIFSNDEKSYSTSLKSRLTISKDTSKSQVVLTMTNMDPVDTATYFCARVPEYSSGWYRFDYWGQGTLVTVSSGGGGSGGGGSGGGGSDIQMTQSPSSLSASVGDRVTISCRASQSIRSYLNWYQQKPGKAPKLLIYATSSLQGGVPSRFSGSGSGTDFTLTISSLQPEDFATYYCQQSYSTPFTFGCGTKVEIKSGGGGSEVQLVESGGGLVQPGGSLKLSCAASGFTFNKYAMNWVRQAPGKCLEWVARIRSKYNNYATYYADSVKDRFTISRDDSKNTAYLQMNNLKTEDTAVYYCVRHGNFGNSYISYWAYWGQGTLVTVSSGGGGSGGGGSGGGGSQTVVTQEPSLTVSPGGTVTLTCGSSTGAVTSGNYPNWVQQKPGQAPRGLIGGTKFLAPGTPARFSGSLLGGKAALTLSGVQPEDEAEYYCVLWYSNRWVFGCGTKLTVL

SEQ ID NO: 431 - protein, 1626 aa, Synthetic construct
ELVMTQSPSSLTVTAGEKVTMSCKSSQSLLNSGNQKNYLTWYQQKPGQPPKLLIYWASTRESGVPDRFTGSGSGTDFTLTISSVQAEDLAVYYCQNDYSYPLTFGAGTKLEIKGGGGSGGGGSGGGGSEVQLLEQSGAELVRPGTSVKISCKASGYAFTNYWLGWVKQRPGHGLEWIGDIFPGSGNIHYNEKFKGKATLTADKSSSTAYMQLSSLTFEDSAVYFCARLRNWDEPMDYWGQGTTVTVSSGGGGSEVQLVESGGGLVQPGGSLKLSCAASGFTFNKYAMNWVRQAPGKCLEWVARIRSKYNNYATYYADSVKDRFTISRDDSKNTAYLQMNNLKTEDTAVYYCVRHGNFGNSYISYWAYWGQGTLVTVSSGGGGSGGGGSGGGGSQTVVTQEPSLTVSPGGTVTLTCGSSTGAVTSGNYPNWVQQKPGQAPRGLIGGTKFLAPGTPARFSGSLLGGKAALTLSGVQPEDEAEYYCVLWYSNRWVFGCGTKLTVLGGGGSGGGGSGGGGSDAHKSEVAHRFKDLGEENFKALVLIAFAQYLQQCPFEDHVKLVNEVTEFAKTCVADESAENCDKSLHTLFGDKLCTVATLRETYGEMADCCAKQEPERNECFLQHKDDNPNLPRLVRPEVDVMCTAFHDNEETFLKKYLYEIARRHPYFYAPELLFFAKRYKAAFTECCQAADKAACLLPKLDELRDEGKASSAKQRLKCASLQKFGERAFKAWAVARLSQRFPKAEFAEVSKLVTDLTKVHTECCHGDLLECADDRADLAKYICENQDSISSKLKECCEKPLLEKSHCIAEVENDEMPADLPSLAADFVESKDVCKNYAEAKDVFLGMFLYEYARRHPDYSVVLLLRLAKTYETTLEKCCAAADPHECYAKVFDEFKPLVEEPQNLIKQNCELFEQLGEYKFQNALLVRYTKKVPQVSTPTLVEVSRNLGKVGSKCCKHPEAKRMPCAEDYLSVVLNQLCVLHEKTPVSDRVTKCCTESLVNRRPCFSALEVDETYVPKEFNAETFTFHADICTLSEKERQIKKQTALVELVKHKPKATKEQLKAVMDDFAAFVEKCCKADDKETCFAEEGKKLVAASQAALGLGGGGSGGGGSGGGGSEVQLLESGGGVVQPGRSLRLSCAASGFTFSSYGMGWVRQAPGKGLEWVAVISYDGSNKYYADSVKGRFTISRDNSKNTLYLQMNSLRAEDTAVYYCAREGAHFGSGSYYPLYYYYAMDVWGQGTTVTVSSGGGGSGGGGSGGGGSELTLTQSPGTLSLSPGERATLSCRASQSVSSSYLAWYQQKPGQAPRLLIYGASIRATGIPDRFSGSGSGTDFTLTISRLEPEDFAVYYCQQYGSSPIFTFGPGTKVEIKSGGGGSEVQLVESGGGLVQPGGSLKLSCAASGFTFNKYAMNWVRQAPGKCLEWVARIRSKYNNYATYYADSVKDRFTISRDDSKNTAYLQMNNLKTEDTAVYYCVRHGNFGNSYISYWAYWGQGTLVTVSSGGGGSGGGGSGGGGSQTVVTQEPSLTVSPGGTVTLTCGSSTGAVTSGNYPNWVQQKPGQAPRGLIGGTKFLAPGTPARFSGSLLGGKAALTLSGVQPEDEAEYYCVLWYSNRWVFGCGTKLTVL

SEQ ID NO: 432 - protein, 17 aa, Synthetic construct
NIAYGVAGTNYNQKFQG

SEQ ID NO: 433 - protein, 117 aa, Synthetic construct
QVQLVQSGAEVKKPGASVKVSCKASGYTFTNYWMNWVRQAPGQCLEWMGNIAYGVAGTNYNQKFQGRVTMTVDTSSSTAYMELSRLRSDDTAVYYCATRYFYVMDYWGQGTLVTVSS

SEQ ID NO: 434 - protein, 1474 aa, Synthetic construct
QVQLVQSGAEVKKPGASVKVSCKASGYTFTNYWMNWVRQAPGQCLEWMGNIAYGVAGTNYNQKFQGRVTMTVDTSSSTAYMELSRLRSDDTAVYYCATRYFYVMDYWGQGTLVTVSSGGGGQGGGGQGGGGQDIQMTQSPSSLSASVGDRVTITCRASQDISNYLNWYQQKPGKVPKLLIYYTSRLHSGVPSRFSGSGSGTDFTLTISSLQPEDVATYYCVQYAQFPLTFGCGTKVEIKSGGGGQEVQLVESGGGLVQPGGSLKLSCAASGFTFNKYAMNWVRQAPGKGMEWVARIRSKYNNYATYYADAVKDRFTISRDDSKNTLYLQMNNLKTEDTAVYYCVRAGNFGSSYISYFAYWGQGTLVTVSSGGGGQGGGGQGGGGQQTVVTQEPSLTVSPGGTVTITCGSSTGAVTSGNYPNWIQKKPGQAPRGLIGGTKFLAPGTPARFSGSLEGGKAALTLSGVQPEDEAEYYCVLYYSNRWVFGSGTKLTVLGGGGCPPCPAPELLGGPSVFLFPPKPKDTLMISRTPEVTCVVVDVSHEEPEVKFNWYVDGVEVHNAKTKPCEEQYGSTYRCVSVLTVLHQDWLNGKEYKCKVSNKALPAPIEKTISKAKGQPREPQVYTLPPSREEMTKNQVSLTCLVKGFYPSDIAVEWESNGQPENNYKTTPPVLDSDGSFFLYSKLTVDKSRWQQGNVFSCSVMHEALHNHYTQKSLSLSPGKGGGGQGGGGQGGGGQGGGGQGGGGQGGGGQCPPCPAPELLGGPSVFLFPPKPKDTLMISRTPEVTCVVVDVSHEEPEVKFNWYVDGVEVHNAKTKPCEEQYGSTYRCVSVLTVLHQDWLNGKEYKCKVSNKALPAPIEKTISKAKGQPREPQVYTLPPSREEMTKNQVSLTCLVKGFYPSDIAVEWESNGQPENNYKTTPPVLDSDGSFFLYSKLTVDKSRWQQGNVFSCSVMHEALHNHYTQKSLSLSPGKGGGGQVQLQESGPGLVKPSETLSLTCTVSGGSISSSSYFWGWIRQPPGKCLEWIGNIYYSGSSNYNPSLKSRVTISVDTSKNQFSLKLSSVTAADTAVYYCARLPRGDRDAFDIWGQGTMVTVSSGGGGQGGGGQGGGGQDIVMTQSPSSLSASVGDRVTITCRASQGISNYLAWYQQKPGKVPKLLIYAASTLQSGVPSRFSGSGSGTDFTLTISSLQPEDFATYYCQQSYSTPFTFGCGTKVEIKSGGGGQEVQLVESGGGLVQPGGSLKLSCAASGFTFNKYAMNWVRQAPGKGMEWVARIRSKYNNYATYYADAVKDRFTISRDDSKNTLYLQMNNLKTEDTAVYYCVRAGNFGSSYISYFAYWGQGTLVTVSSGGGGQGGGGQGGGGQQTVVTQEPSLTVSPGGTVTITCGSSTGAVTSGNYPNWIQKKPGQAPRGLIGGTKFLAPGTPARFSGSLEGGKAALTLSGVQPEDEAEYYCVLYYSNRWVFGSGTKLTVL

SEQ ID NO: 435 - protein, 1474 aa, Synthetic construct
QVQLVQSGAEVKKPGASVKVSCKASGYTFTNYWMNWVRQAPGQCLEWMGNIAYGVAGTNYNQKFQGRVTMTVDTSSSTAYMELSRLRSDDTAVYYCATRYFYVMDYWGQGTLVTVSSGGGGQGGGGQGGGGQEIQMTQSPSSLSASVGDRVTITCRASQDISNYLNWYQQKPGKVPKLLIYYTSRLHSGVPSRFSGSGSGTDFTLTISSLQPEDVATYYCVQYAQFPLTFGCGTKVEIKSGGGGQEVQLVESGGGLVQPGGSLKLSCAASGFTFNKYAMNWVRQAPGKGMEWVARIRSKYNNYATYYADAVKDRFTISRDDSKNTLYLQMNNLKTEDTAVYYCVRAGNFGSSYISYFAYWGQGTLVTVSSGGGGQGGGGQGGGGQQTVVTQEPSLTVSPGGTVTITCGSSTGAVTSGNYPNWIQKKPGQAPRGLIGGTKFLAPGTPARFSGSLEGGKAALTLSGVQPEDEAEYYCVLYYSNRWVFGSGTKLTVLGGGGCPPCPAPELLGGPSVFLFPPKPKDTLMISRTPEVTCVVVDVSHEEPEVKFNWYVDGVEVHNAKTKPCEEQYGSTYRCVSVLTVLHQDWLNGKEYKCKVSNKALPAPIEKTISKAKGQPREPQVYTLPPSREEMTKNQVSLTCLVKGFYPSDIAVEWESNGQPENNYKTTPPVLDSDGSFFLYSKLTVDKSRWQQGNVFSCSVMHEALHNHYTQKSLSLSPGKGGGGQGGGGQGGGGQGGGGQGGGGQGGGGQCPPCPAPELLGGPSVFLFPPKPKDTLMISRTPEVTCVVVDVSHEEPEVKFNWYVDGVEVHNAKTKPCEEQYGSTYRCVSVLTVLHQDWLNGKEYKCKVSNKALPAPIEKTISKAKGQPREPQVYTLPPSREEMTKNQVSLTCLVKGFYPSDIAVEWESNGQPENNYKTTPPVLDSDGSFFLYSKLTVDKSRWQQGNVFSCSVMHEALHNHYTQKSLSLSPGKGGGGQVQLQESGPGLVKPSETLSLTCTVSGGSISSSSYFWGWIRQPPGKCLEWIGNIYYSGSSNYNPSLKSRVTISVDTSKNQFSLKLSSVTAADTAVYYCARLPRGDRDAFDIWGQGTMVTVSSGGGGQGGGGQGGGGQEIVMTQSPSSLSASVGDRVTITCRASQGISNYLAWYQQKPGKVPKLLIYAASTLQSGVPSRFSGSGSGTDFTLTISSLQPEDFATYYCQQSYSTPFTFGCGTKVEIKSGGGGQEVQLVESGGGLVQPGGSLKLSCAASGFTFNKYAMNWVRQAPGKGMEWVARIRSKYNNYATYYADAVKDRFTISRDDSKNTLYLQMNNLKTEDTAVYYCVRAGNFGSSYISYFAYWGQGTLVTVSSGGGGQGGGGQGGGGQQTVVTQEPSLTVSPGGTVTITCGSSTGAVTSGNYPNWIQKKPGQAPRGLIGGTKFLAPGTPARFSGSLEGGKAALTLSGVQPEDEAEYYCVLYYSNRWVFGSGTKLTVL

SEQ ID NO: 436 - protein, 5 aa, Synthetic construct
KYAMN

SEQ ID NO: 437 - protein, 19 aa, Synthetic construct
RIRSKYNNYATYYADAVKD

SEQ ID NO: 438 - protein, 14 aa, Synthetic construct
AGNFGTSYISYWAY

SEQ ID NO: 439 - protein, 14 aa, Synthetic construct
GSSTGAVTSGNYPN

SEQ ID NO: 440 - protein, 7 aa, Synthetic construct
GTKFLAP

SEQ ID NO: 441 - protein, 9 aa, Synthetic construct
VLWYSNRWV

SEQ ID NO: 442 - protein, 125 aa, Synthetic construct
EVQLVESGGGLVQPGGSLKLSCAASGFTFNKYAMNWVRQAPGKGMEWVARIRSKYNNYATYYADAVKDRFTISRDDSKNTLYLQMNNLKTEDTAVYYCVRAGNFGTSYISYWAYWGQGTLVTVSS

SEQ ID NO: 443 - protein, 109 aa, Synthetic construct; identical to SEQ ID NO: 60

SEQ ID NO: 444 - protein, 12 aa, Synthetic construct
ESKYGPPCPSCP

SEQ ID NO: 445 - protein, 15 aa, Synthetic construct
EPKSCDKTHTCPPCP

SEQ ID NO: 446 - protein, 5 aa, Synthetic construct
RYDMH

SEQ ID NO: 447 - protein, 17 aa, Synthetic construct
IISYDGSNKYYGDAVKG

SEQ ID NO: 448 - protein, 8 aa, Synthetic construct
RAGFQFDF

SEQ ID NO: 449 - protein, 14 aa, Synthetic construct
TGTSSDVGGYNYVS

SEQ ID NO: 450 - protein, 7 aa, Synthetic construct
DVSSRPS

SEQ ID NO: 451 - protein, 10 aa, Synthetic construct
SSYTSSSTWV

SEQ ID NO: 452 - protein, 117 aa, Synthetic construct
QVQLVESGGGVVQPGRSLRLSCAASGFTFSRYDMHWVRQAPGQCLEWMAIISYDGSNKYYGDAVKGRFTISRDNSRNTLYLQMNSLRAEDTAVYHCVKRAGFQFDFWGQGTLVTVSS

SEQ ID NO: 453 - protein, 110 aa, Synthetic construct
QSALTQPPSVSGSPGQSITISCTGTSSDVGGYNYVSWYQQHPGKAPKLMIYDVSSRPSGVSNRFSGSKSGNTASLTISGLQAEDEADYYCSSYTSSSTWVFGCGTKLTVL

SEQ ID NO: 454 - protein, 5 aa, Synthetic construct
DYGMH

SEQ ID NO: 455 - protein, 17 aa, Synthetic construct
GISWNSGNIGYADSVKG

SEQ ID NO: 456 - protein, 16 aa, Synthetic construct
PDCSSTSCYRGYYFDY

SEQ ID NO: 457 - protein, 11 aa, Synthetic construct
GGNNIGSKSVH

SEQ ID NO: 458 - protein, 7 aa, Synthetic construct
DVSDRPS

SEQ ID NO: 459 - protein, 11 aa, Synthetic construct
QVWDSNTDHVV

SEQ ID NO: 460 - protein, 125 aa, Synthetic construct
EVQLVESGGGLVQPGRSLRLSCAASGFTFDDYGMHWVRQAPGKCLEWVSGISWNSGNIGYADSVKGRFTISRDNAKNSLYLQMNSLRAEDTALYYCAKPDCSSTSCYRGYYFDYWGQGTLVTVSS

SEQ ID NO: 461 - protein, 108 aa, Synthetic construct
SYVLTQPASVSVAPGQTARITCGGNNIGSKSVHWYQQKPGQAPILVVYDVSDRPSGIPERFSGSNSGNTATLTISRVEAGDEADYYCQVWDSNTDHVVFGCGTKLTVL

SEQ ID NO: 462 - protein, 5 aa, Synthetic construct
SYAII

SEQ ID NO: 463 - protein, 17 aa, Synthetic construct
GIIPMFGTANYAQKFQG

SEQ ID NO: 464 - protein, 9 aa, Synthetic construct
VSGTYHWGY

SEQ ID NO: 465 - protein, 14 aa, Synthetic construct
TGTSSDVGGYNYVS

SEQ ID NO: 466 - protein, 7 aa, Synthetic construct
DVSARPS

SEQ ID NO: 467 - protein, 10 aa, Synthetic construct
SSYISSTSLV

SEQ ID NO: 468 - protein, 118 aa, Synthetic construct
QVQLVQSGAEVKKPGSSVKVSCKASGGTFSSYAIIWVRQAPGQCLEWMGGIIPMFGTANYAQKFQGRVTITADESTSTAYMELSSLRSEDTAVYYCARVSGTYHWGYWGQGTLVTVSS

SEQ ID NO: 469 - protein, 110 aa, Synthetic construct
QSALTQPASVSGSPGQSITISCTGTSSDVGGYNYVSWYQQHPGKAPKLMIYDVSARPSGVSNRFSGSKSGNTASLTISGLQAEDEADYYCSSYISSTSLVFGCGTKLTVL

SEQ ID NO: 470 - protein, 5 aa, Synthetic construct
NYDMN

SEQ ID NO: 471 - protein, 17 aa, Synthetic construct
VISYDGSQKSYSDSVKG

SEQ ID NO: 472 - protein, 8 aa, Synthetic construct
RGATPFDY

SEQ ID NO: 473 - protein, 14 aa, Synthetic construct
TGTSNDVGGYNYVS

SEQ ID NO: 474 - protein, 7 aa, Synthetic construct
DVSSRPS

SEQ ID NO: 475 - protein, 11 aa, Synthetic construct
SSYARSRTFVA

SEQ ID NO: 476 - protein, 117 aa, Synthetic construct
QVQLVESGGGVLQPGRSLRLSCAASGFTFRNYDMNWVRQVPGKCLEWVAVISYDGSQKSYSDSVKGRFTISRDNSKNTLSLQMNSLRNEDTAVYYCAKRGATPFDYWGQGTLVTVSS

SEQ ID NO: 477 - protein, 111 aa, Synthetic construct
QSALTQPASVSGSPGQSITISCTGTSNDVGGYNYVSWYQQHPGKAPKLMIYDVSSRPSGISNRFSGSKSGNTASLTISGLQAEDEADYYCSSYARSRTFVAFGCGTKLTVL

SEQ ID NO: 478 - protein, 5 aa, Synthetic construct
NYDMN

SEQ ID NO: 479 - protein, 17 aa, Synthetic construct
VISYDGSNKYYSDSVKG

SEQ ID NO: 480 - protein, 8 aa, Synthetic construct
RGATPFDY

SEQ ID NO: 481 - protein, 14 aa, Synthetic construct
TGTSNDVGGYNYVS

SEQ ID NO: 482 - protein, 7 aa, Synthetic construct
DVSSRPS

SEQ ID NO: 483 - protein, 11 aa, Synthetic construct
SSYARSRTFVA

SEQ ID NO: 484 - protein, 117 aa, Synthetic construct
QVQLVESGGGVLQPGRSLRLSCAASGFTFRNYDMNWVRQVPGKCLEWVAVISYDGSNKYYSDSVKGRFTISRDNSKNTLSLQMNSLRNEDTAVYYCAKRGATPFDYWGQGTLVTVSS

SEQ ID NO: 485 - protein, 111 aa, Synthetic construct; identical to SEQ ID NO: 477

SEQ ID NO: 486 - protein, 5 aa, Synthetic construct
NYDMN

SEQ ID NO: 487 - protein, 17 aa, Synthetic construct
VISYDGSDKHYTDSVKG

SEQ ID NO: 488 - protein, 8 aa, Synthetic construct
RGATPVDY

SEQ ID NO: 489 - protein, 16 aa, Synthetic construct
KSSQSLLHSNGYNYLG

SEQ ID NO: 490 - protein, 7 aa, Synthetic construct
FGSSRAS

SEQ ID NO: 491 - protein, 9 aa, Synthetic construct
MQALQTPFT

SEQ ID NO: 492 - protein, 117 aa, Synthetic construct
QVQLVESGGGVVQPGRSLRLSCAASGFTFRNYDMNWVRQAPGKCLEWVAVISYDGSDKHYTDSVKGRFTISRDNSKNTLYLQMNSLRTEDTAVYYCAKRGATPVDYWGQGTLVTVSS

SEQ ID NO: 493 - protein, 112 aa, Synthetic construct
EIVMTQSPLSLPVTPGEPASISCKSSQSLLHSNGYNYLGWYLQKPGQSPQLLIYFGSSRASGVPDRFSGSGSGTDFTLKISGVEAEDVGVYYCMQALQTPFTFGCGTKVDIK

SEQ ID NO: 494 - protein, 5 aa, Synthetic construct
SYAII

SEQ ID NO: 495 - protein, 17 aa, Synthetic construct
GIIPIFGTANYAQKFQG

SEQ ID NO: 496 - protein, 9 aa, Synthetic construct
VSGTYHWGY

SEQ ID NO: 497 - protein, 14 aa, Synthetic construct
TGTSSDIGSFNLVS

SEQ ID NO: 498 - protein, 7 aa, Synthetic construct
EGYKRPS

SEQ ID NO: 499 - protein, 10 aa, Synthetic construct
SSYISSSTLV

SEQ ID NO: 500 - protein, 118 aa, Synthetic construct
QVQLVQSGAEVKKPGSSVKVSCKVSGGTFSSYAIIWVRQAPGQCLEWMGGIIPIFGTANYAQKFQGRVTITADESTSTAYMELSSLRSDDTAVYYCARVSGTYHWGYWGQGTLVTVSS

SEQ ID NO: 501 - protein, 110 aa, Synthetic construct
QSALTQPPSASGSPGQSITISCTGTSSDIGSFNLVSWYQQHPGKAPKLMIYEGYKRPSGVSDRFSGSKSGNTASLTISGLQAEDEADYYCSSYISSSTLVFGCGTKLTVL

SEQ ID NO: 502 - protein, 5 aa, Synthetic construct
RYWMS

SEQ ID NO: 503 - protein, 17 aa, Synthetic construct
EINPDSSTINYTPSLKD

SEQ ID NO: 504 - protein, 6 aa, Synthetic construct
YPWFTY

SEQ ID NO: 505 - protein, 16 aa, Synthetic construct
RSSQSLVHSNGNTYLH

SEQ ID NO: 506 - protein, 7 aa, Synthetic construct
KVSNRFS

SEQ ID NO: 507 - protein, 9 aa, Synthetic construct
SQSTHVPFT

SEQ ID NO: 508 - protein, 115 aa, Synthetic construct
EVQLVESGGGLVQPGGSLKLSCAASGFDFSRYWMSWVRQAPGKCLEWIGEINPDSSTINYTPSLKDKFIVSRDNAKNTLYLQMSKVRSEDTALYYCARYPWFTYWGQGTLVTVSS

SEQ ID NO: 509 - protein, 112 aa, Synthetic construct
EIVMTQTPLSLPVSLGDQASISCRSSQSLVHSNGNTYLHWYLQKPGQSPKLLIYKVSNRFSGVPDRFSGSGSGTDFTLKISRVEAEDLGVYFCSQSTHVPFTFGCGTKLEIK

SEQ ID NO: 510 - protein, 5 aa, Synthetic construct
NYDMN

SEQ ID NO: 511 - protein, 17 aa, Synthetic construct
VISYDGSNKYYTDSVKG

SEQ ID NO: 512 - protein, 8 aa, Synthetic construct
RGATPVDY

SEQ ID NO: 513 - protein, 16 aa, Synthetic construct
RSSQSLLHSNGYNYLG

SEQ ID NO: 514 - protein, 7 aa, Synthetic construct
LGSSRAS

SEQ ID NO: 515 - protein, 9 aa, Synthetic construct
MQALQTPFT

SEQ ID NO: 516 - protein, 117 aa, Synthetic construct
EVQLLESGGGLVQPGRSLRLSCAASGFTFRNYDMNWVRQVPGKCLEWVAVISYDGSNKYYTDSVKGRFTISRDNSKNTLYLQMNSLRTEDTAVYYCAKRGATPVDYWGQGTLVTVSS

SEQ ID NO: 517 - protein, 112 aa, Synthetic construct
EIVMTQSPLSLPVTPGEPASISCRSSQSLLHSNGYNYLGWYLQKPGQSPQLLIYLGSSRASGVPDRFSGSGSGTDFTLKISRVEAEDVGVYYCMQALQTPFTFGCGTKLEIK

SEQ ID NO: 518 - protein, 5 aa, Synthetic construct
NYDMN

SEQ ID NO: 519 - protein, 17 aa, Synthetic construct
VISYDGSQKTYTDSVKG

SEQ ID NO: 520 - protein, 8 aa, Synthetic construct
RGATPVDY

SEQ ID NO: 521 - protein, 16 aa, Synthetic construct
RSSQSLLHSNGYNYLG

SEQ ID NO: 522 - protein, 7 aa, Synthetic construct
LGSSRAS

SEQ ID NO: 523 - protein, 9 aa, Synthetic construct
MQALQTPFT

SEQ ID NO: 524 - protein, 117 aa, Synthetic construct
EVQLLESGGGLVQPGRSLRLSCAASGFTFRNYDMNWVRQVPGKCLEWVAVISYDGSQKTYTDSVKGRFTISRDNSKNTLYLQMNSLRTEDTAVYYCAKRGATPVDYWGQGTLVTVSS

SEQ ID NO: 525 - protein, 112 aa, Synthetic construct; identical to SEQ ID NO: 517

SEQ ID NO: 526 - protein, 5 aa, Synthetic construct
RYDMH

SEQ ID NO: 527 - protein, 17 aa, Synthetic construct
IISYDGSNKYYGDAVKG

SEQ ID NO: 528 - protein, 8 aa, Synthetic construct
RAGFQFDF

SEQ ID NO: 529 - protein, 14 aa, Synthetic construct
TGTSSDVGGYNYVS

SEQ ID NO: 530 - protein, 7 aa, Synthetic construct
EVSKRPA

SEQ ID NO: 531 - protein, 10 aa, Synthetic construct
SSYAGSNNWV

SEQ ID NO: 532 - protein, 117 aa, Synthetic construct; identical to SEQ ID NO: 452

SEQ ID NO: 533 - protein, 110 aa, Synthetic construct
QSALTQPPSASGSPGQSVTISCTGTSSDVGGYNYVSWYRQHPGKAPKLMIYEVSKRPAGVPDRFSGSKSGNTASLTVSGLQAEDEADYYCSSYAGSNNWVFGCGTKLTVL

SEQ ID NO: 534 - protein, 5 aa, Synthetic construct
RYDMN

SEQ ID NO: 535 - protein, 17 aa, Synthetic construct
FISYDGSNEDYPDAVKG

SEQ ID NO: 536 - protein, 8 aa, Synthetic construct
VGASPFDY

SEQ ID NO: 537 - protein, 14 aa, Synthetic construct
TGTSNDVGGYNYVS

SEQ ID NO: 538 - protein, 7 aa, Synthetic construct
EVSKRPS

SEQ ID NO: 539 - protein, 11 aa, Synthetic construct
ASYTGGRTYVG

SEQ ID NO: 540 - protein, 117 aa, Synthetic construct
QVQLVESGGGVVQPGRSLRLSCAASGFTFSRYDMNWVRQAPGKCLEWVAFISYDGSNEDYPDAVKGRFTISRDNSKNTLYLQMNSLRAEDTAVYYCAKVGASPFDYWGQGTLVTVSS

SEQ ID NO: 541 - protein, 111 aa, Synthetic construct
QSALTQPPSVSGSPGQSITISCTGTSNDVGGYNYVSWYQQHPGKAPKLMIYEVSKRPSGVPDRFSGSKSGNTASLTISGLQAEDEADYYCASYTGGRTYVGFGCGTKLTVL

SEQ ID NO: 542 - protein, 5 aa, Synthetic construct
RYDMN

SEQ ID NO: 543 - protein, 17 aa, Synthetic construct
FISYDGSNEDYPDAVKG

SEQ ID NO: 544 - protein, 8 aa, Synthetic construct
VGASPFDY

SEQ ID NO: 545 - protein, 14 aa, Synthetic construct
TGTSNDVGGYNYVS

SEQ ID NO: 546 - protein, 7 aa, Synthetic construct
EVSKRPS

SEQ ID NO: 547 - protein, 11 aa, Synthetic construct
LSYTGGRTYVG

SEQ ID NO: 548 - protein, 117 aa, Synthetic construct; identical to SEQ ID NO: 540

SEQ ID NO: 549 - protein, 111 aa, Synthetic construct
QSALTQPPSVSGSPGQSITISCTGTSNDVGGYNYVSWYQQHPGKAPKLMIYEVSKRPSGVPDRFSGSKSGNTASLTISGLQAEDEADYYCLSYTGGRTYVGFGCGTKLTVL

SEQ ID NO: 550 - protein, 5 aa, Synthetic construct
TYTIS

SEQ ID NO: 551 - protein, 17 aa, Synthetic construct
GIIPILGAPNYAQKFQG

SEQ ID NO: 552 - protein, 6 aa, Synthetic construct
DPFSRY

SEQ ID NO: 553 - protein, 16 aa, Synthetic construct
RSSQSLLHSNGYNYLD

SEQ ID NO: 554 - protein, 7 aa, Synthetic construct
LGSNRAS

SEQ ID NO: 555 - protein, 9 aa, Synthetic construct
MQALQTPRT

SEQ ID NO: 556 - protein, 115 aa, Synthetic construct
QVQLVQSGAEVKKPGSSVKVSCKVSGGTFSTYTISWVRQAPGQCLEWMGGIIPILGAPNYAQKFQGRVSITADESTSTSYMELTSLRSEDTAVYYCARDPFSRYWGQGTLVTVSS

SEQ ID NO: 557 - protein, 112 aa, Synthetic construct
EIVMTQSPLSLPVTPGEPASISCRSSQSLLHSNGYNYLDWYLQKPGQSPQLLIYLGSNRASGVPDRFSGSGSGTDFTLKISRVEAEDVGVYYCMQALQTPRTFGCGTKVEIK

SEQ ID NO: 558 - protein, 5 aa, Synthetic construct
SYAII

SEQ ID NO: 559 - protein, 17 aa, Synthetic construct
GIIPMFGTANYAQKFQG

SEQ ID NO: 560 - protein, 9 aa, Synthetic construct
VSGTYHWGY

SEQ ID NO: 561 - protein, 14 aa, Synthetic construct
TGTSSDVGGYNYVS

SEQ ID NO: 562 - protein, 7 aa, Synthetic construct
DVSARPS

SEQ ID NO: 563 - protein, 10 aa, Synthetic construct
SSYISITTLV

SEQ ID NO: 564 - protein, 118 aa, Synthetic construct
QVQLVQSGAEVKKPGSSVKVSCKASGGTFRSYAIIWVRQAPGQCLEWMGGIIPMFGTANYAQKFQGRVTITADESTSTAYMELSRLRSEDTAVYYCARVSGTYHWGYWGQGTLVTVSS

SEQ ID NO: 565 - protein, 110 aa, Synthetic construct
QSALTQPASVSGSPGQSITISCTGTSSDVGGYNYVSWYQQRPGRAPKLMIYDVSARPSGVSNRFSGSKSGNTASLTISGLQAEDEADYYCSSYISITTLVFGCGTKLTVL

SEQ ID NO: 566 - protein, 5 aa, Synthetic construct
RYDMH

SEQ ID NO: 567 - protein, 17 aa, Synthetic construct
IISYDGSIRYYADSVKG

SEQ ID NO: 568 - protein, 8 aa, Synthetic construct
RAGFQFDS

SEQ ID NO: 569 - protein, 14 aa, Synthetic construct
TGTSSDVGGYNYVS

SEQ ID NO: 570 - protein, 7 aa, Synthetic construct
EVSKRPA

SEQ ID NO: 571 - protein, 11 aa, Synthetic construct
SSYAGGNNFVV

SEQ ID NO: 572 - protein, 117 aa, Synthetic construct
QVQLVESGGGVVQPGRSLRLSCAASGFTFSRYDMHWVRQAPGQCLEWMAIISYDGSIRYYADSVKGRFTISRDNSRNTLYLQMNSLRAEDTAVYYCVKRAGFQFDSWGQGTLVTVSS

SEQ ID NO: 573 - protein, 111 aa, Synthetic construct
QSALTQPPSASGSPGQSVTISCTGTSSDVGGYNYVSWYQQHPGKAPKLMIYEVSKRPAGVPDRFSGSKSGNTASLTVSGLQAEDEADYYCSSYAGGNNFVVFGCGTKLTVL

SEQ ID NO: 574 - protein, 5 aa, Synthetic construct
EYWMS

SEQ ID NO: 575 - protein, 17 aa, Synthetic construct
EIIPDSSKINYTPSLKD

SEQ ID NO: 576 - protein, 12 aa, Synthetic construct
PLYYGYDEGFAY

SEQ ID NO: 577 - protein, 16 aa, Synthetic construct
RSSQSLVHSNGNTYLE

SEQ ID NO: 578 - protein, 7 aa, Synthetic construct
KVSNRFS

SEQ ID NO: 579 - protein, 9 aa, Synthetic construct
FQGSHVPYT

SEQ ID NO: 580 - protein, 121 aa, Synthetic construct
EVQLVESGGGLVQPGRSLKLSCAASGFDFSEYWMSWVRQAPGKCLEWIGEIIPDSSKINYTPSLKDKFIISRDNAKNTLYLQMSKVRSEDTALYYCARPLYYGYDEGFAYWGQGTTVTVSS

SEQ ID NO: 581 - protein, 112 aa, Synthetic construct
EIVMTQTPLSLPVSLGDQASISCRSSQSLVHSNGNTYLEWYLQKPGQSPKLLIYKVSNRFSGVPDRFSGSGSGTDFTLKISRVEAEDLGVYYCFQGSHVPYTFGCGTRLEIK

SEQ ID NO: 582 - protein, 5 aa, Synthetic construct
SYAMH

SEQ ID NO: 583 - protein, 19 aa, Synthetic construct
RVRSKSDNYATYYADSVKD

SEQ ID NO: 584 - protein, 14 aa, Synthetic construct
PLFTTVEVTNALDY

SEQ ID NO: 585 - protein, 12 aa, Synthetic construct
SASSSISSNYLH

SEQ ID NO: 586 - protein, 7 aa, Synthetic construct
RTSVLSS

SEQ ID NO: 587 - protein, 9 aa, Synthetic construct
QQGSSMPFT

SEQ ID NO: 588 - protein, 125 aa, Synthetic construct
EVQLVESGGGLVQPKGSLKLSCAASGFTFNSYAMHWVRQAPGRCMEWVGRVRSKSDNYATYYADSVKDRFTISRDDSQSMLYLQMNNLKTEDTAIYYCVRPLFTTVEVTNALDYWGQGTLVTVSS

SEQ ID NO: 589 - protein, 108 aa, Synthetic construct
EIVLTQSPTTMAASPGEKITITCSASSSISSNYLHWYQQKPGFSPKLLIYRTSVLSSGVPARFSGSGSGTSYSLTIDTMEAEDVATYFCQQGSSMPFTFGCGTRLEIK

SEQ ID NO: 590 - protein, 5 aa, Synthetic construct
NYWMQ

SEQ ID NO: 591 - protein, 17 aa, Synthetic construct
AIYPGEGETRYTQKFKG

SEQ ID NO: 592 - protein, 12 aa, Synthetic construct
PYAGYYLYAMDQ

SEQ ID NO: 593 - protein, 16 aa, Synthetic construct
RSSQSIVHSNGNTYLE

SEQ ID NO: 594 - protein, 7 aa, Synthetic construct
KVSNRFS

SEQ ID NO: 595 - protein, 9 aa, Synthetic construct
SQSTHVPYT

SEQ ID NO: 596 - protein, 121 aa, Synthetic construct
QVQLVQSGAELARPGASVKLSCKASGYIFSNYWMQWVKQRPGQCLEWIGAIYPGEGETRYTQKFKGKATLTADTSSSTAYMQLSSLASEDSAVYYCARPYAGYYLYAMDQWGQGTTVTVSS

SEQ ID NO: 597 - protein, 112 aa, Synthetic construct
EIVMTQTPLSLPVSLGDQASISCRSSQSIVHSNGNTYLEWYLQKPGQSPKLLIYKVSNRFSGVPDRFSGSGSGTDFTLKISRVEAEDLGVYFCSQSTHVPYTFGCGTRLEIK

SEQ ID NO: 598 - protein, 5 aa, Synthetic construct
NYDMN

SEQ ID NO: 599 - protein, 17 aa, Synthetic construct
VISYDGSNKYYTDSVKG

SEQ ID NO: 600 - protein, 8 aa, Synthetic construct
RGATPVDY

SEQ ID NO: 601 - protein, 16 aa, Synthetic construct
RSSQSLLHSNGYNYLG

SEQ ID NO: 602 - protein, 7 aa, Synthetic construct
FGSSRAS

SEQ ID NO: 603 - protein, 9 aa, Synthetic construct
MQALQTPFT

SEQ ID NO: 604 - protein, 117 aa, Synthetic construct
QVQLVESGGGVVQPGRSLRLSCAASGFTFSNYDMNWVRQAPGKCLEWVAVISYDGSNKYYTDSVKGRFTISRDNSKNTLYLQMNSLRTEDTAVYYCAKRGATPVDYWGQGTLVTVSS

SEQ ID NO: 605 - protein, 112 aa, Synthetic construct
EIVMTQSPLSLPVTPGEPASISCRSSQSLLHSNGYNYLGWYLQKPGQSPQLLIYFGSSRASGVPDRFSGSGSGTDFTLKISGVEAEDVGVYYCMQALQTPFTFGCGTKVDIK

SEQ ID NO: 606 - protein, 5 aa, Synthetic construct
RYDMH

SEQ ID NO: 607 - protein, 17 aa, Synthetic construct
FISYDGSNEDYPDAVKG

SEQ ID NO: 608 - protein, 8 aa, Synthetic construct
VGASPFDY

SEQ ID NO: 609 - protein, 14 aa, Synthetic construct
TGTSSDVGGYNYVS

SEQ ID NO: 610 - protein, 7 aa, Synthetic construct
EVSKRPS

SEQ ID NO: 611 - protein, 10 aa, Synthetic construct
TSYAGSNNLV

SEQ ID NO: 612 - protein, 117 aa, Synthetic construct
QVQLVESGGGVVQPGRSLRLSCAASGFTFSRYDMHWVRQAPGKCLEWVAFISYDGSNEDYPDAVKGRFTISRDNSKNTLYLQMNSLRAEDTAVYYCAKVGASPFDYWGQGTLVTVSS

SEQ ID NO: 613 - protein, 110 aa, Synthetic construct
QSALTQPASVSGSPGRSVTISCTGTSSDVGGYNYVSWYQQHPGKAPKLMIYEVSKRPSGVPVRFSGSKSDNTASLTVSGLQAEDEADYYCTSYAGSNNLVFGCGTKLTVL

SEQ ID NO: 614 - protein, 5 aa, Synthetic construct
NYDMN

SEQ ID NO: 615 - protein, 17 aa, Synthetic construct
VISYDGSQKSYSDSVKG

SEQ ID NO: 616 - protein, 8 aa, Synthetic construct
RGATPFDY

SEQ ID NO: 617 - protein, 11 aa, Synthetic construct
SGDKLGDKYAS

SEQ ID NO: 618 - protein, 7 aa, Synthetic construct
QDSRRPS

SEQ ID NO: 619 - protein, 11 aa, Synthetic construct
QVWDYSSDHWV

SEQ ID NO: 620 - protein, 117 aa, Synthetic construct
QVQLVESGGGVVQPGRSLRLSCAASGFTFRNYDMNWVRQAPGKCLEWVAVISYDGSQKSYSDSVKGRFTISRDNSKNTLSLQMNSLRNEDSAVYYCAKRGATPFDYWGQGTLVTVSS

SEQ ID NO: 621 - protein, 108 aa, Synthetic construct
SYELTQPPSVSVSPGQTASITCSGDKLGDKYASWYQQKPGQSPVLVIYQDSRRPSGIPERFSGSNSGNTATLTISGTQAMDEADYYCQVWDYSSDHWVFGCGTKLTVL

SEQ ID NO: 622 - protein, 5 aa, Synthetic construct
NYDMN

SEQ ID NO: 623 - protein, 17 aa, Synthetic construct
VISYDGSDKHYTDSVKG

SEQ ID NO: 624 - protein, 8 aa, Synthetic construct
RGATPVDY

SEQ ID NO: 625 - protein, 12 aa, Synthetic construct
SASSSISSNSLH

SEQ ID NO: 626 - protein, 7 aa, Synthetic construct
RTSNLAS

SEQ ID NO: 627 - protein, 9 aa, Synthetic construct
QQGSSIPRT

SEQ ID NO: 628 - protein, 117 aa, Synthetic construct
QVQLVESGGGVVQPGRSLRLSCAASGFTFRNYDMNWVRQAPGKCLEWVAVISYDGSDKHYTDSVKGRFTISRDNSKNTLFLQMNSLRTEDTAVYYCAKRGATPVDYWGQGTLVTVSS

SEQ ID NO: 629 - protein, 108 aa, Synthetic construct
EIQMTQSPSSLSASVGDRVTITCSASSSISSNSLHWYQQKPGKAPKLLIYRTSNLASGVPSRFSGSGSGTDFTLTISSLQPEDFATYYCQQGSSIPRTFGCGTKLEIK

SEQ ID NO: 630 - protein, 5 aa, Synthetic construct
RYDMN

SEQ ID NO: 631 - protein, 17 aa, Synthetic construct
FISYDGSNEDYPDAVKG

SEQ ID NO: 632 - protein, 8 aa, Synthetic construct
VGASPFDY

SEQ ID NO: 633 - protein, 12 aa, Synthetic construct
RASQSVSSSYLA

SEQ ID NO: 634 - protein, 7 aa, Synthetic construct
GASSRAT

SEQ ID NO: 635 - protein, 9 aa, Synthetic construct
QQYGSSPRT

SEQ ID NO: 636 - protein, 117 aa, Synthetic construct
QVQLVESGGGVVQPGRSLRLSCAASGFTFSRYDMNWVRQAPGKCLEWVAFISYDGSNEDYPDAVKGRFTISRDNSKNTLYLQLNSLRAEDTAVYYCAKVGASPFDYWGQGTLVTVSS

SEQ ID NO: 637 - protein, 108 aa, Synthetic construct
EIVLTQSPGTLSLSPGERATLSCRASQSVSSSYLAWYQQKPGQAPRLLIYGASSRATGIPDRFSGSGSGTDFTLTISRLEPEDFAVYYCQQYGSSPRTFGCGTKVEIK

SEQ ID NO: 638 - protein, 5 aa, Synthetic construct
NYDMN

SEQ ID NO: 639 - protein, 17 aa, Synthetic construct
VISYDGSNKYYTDSVKG

SEQ ID NO: 640 - protein, 8 aa, Synthetic construct
RGATPFDY

SEQ ID NO: 641 - protein, 11 aa, Synthetic construct
RASQSVNSNLA

SEQ ID NO: 642 - protein, 7 aa, Synthetic construct
GASTRAT

SEQ ID NO: 643 - protein, 9 aa, Synthetic construct
QQYNNWPYT

SEQ ID NO: 644 - protein, 117 aa, Synthetic construct
QVQLVESGGGVVLPGRSLRLSCAASGFTFRNYDMNWVRQAPGKCLEWVAVISYDGSNKYYTDSVKGRFTISRDNSRNTLYLQMNSLRTEDTAVYSCTKRGATPFDYWGQGTLVTVSS

SEQ ID NO: 645 - protein, 107 aa, Synthetic construct
EIVLTQSPATLSVSPGERATLSCRASQSVNSNLAWYQQKPGQAPRLLIYGASTRATGIPARFSGSGSGTEFTLTISSLQSEDFAVYYCQQYNNWPYTFGCGTKLEIK

SEQ ID NO: 646 - protein, 5 aa, Synthetic construct
NYDMN

SEQ ID NO: 647 - protein, 17 aa, Synthetic construct
VISYDGSDKHYTDSVKG

SEQ ID NO: 648 - protein, 8 aa, Synthetic construct
RGATPVDY

SEQ ID NO: 649 - protein, 16 aa, Synthetic construct
RSSQSLLHSNGYNYLD

SEQ ID NO: 650 - protein, 7 aa, Synthetic construct
LGSNRAS

SEQ ID NO: 651 - protein, 9 aa, Synthetic construct
MQALQAPLT

SEQ ID NO: 652 - protein, 117 aa, Synthetic construct; identical to SEQ ID NO: 492

SEQ ID NO: 653 - protein, 112 aa, Synthetic construct
EIVMTQTPLSLPVTPGEPASISCRSSQSLLHSNGYNYLDWYLQKPGQSPQLLIYLGSNRASGVPDRFSGSGSGTDFTLKISRVEAEDVGVYYCMQALQAPLTFGCGTKVDIK

SEQ ID NO: 654 - protein, 5 aa, Synthetic construct
RYDMN

SEQ ID NO: 655 - protein, 17 aa, Synthetic construct
FISYDGSNEDYPDAVKG

SEQ ID NO: 656 - protein, 8 aa, Synthetic construct
VGASPFDY

SEQ ID NO: 657 - protein, 16 aa, Synthetic construct
RSSQSLLHSNGYNYLG

SEQ ID NO: 658 - protein, 7 aa, Synthetic construct
SGSSRAS

SEQ ID NO: 659 - protein, 9 aa, Synthetic construct
MQALQTPFT

SEQ ID NO: 660 - protein, 117 aa, Synthetic construct; identical to SEQ ID NO: 540

SEQ ID NO: 661 - protein, 112 aa, Synthetic construct
EIVMTQSPLSLPVTPGEPASISCRSSQSLLHSNGYNYLGWYLQKPGQSPQLLIYSGSSRASGVPDRFSGSGSGTDFTLKISRVEAEDVGVYYCMQALQTPFTFGCGTKVEIK

SEQ ID NO: 662 - protein, 5 aa, Synthetic construct
RYYMH

SEQ ID NO: 663 - protein, 17 aa, Synthetic construct
VIWHDGSNKYYADSVKG

SEQ ID NO: 664 - protein, 7 aa, Synthetic construct
EAPSLAY

SEQ ID NO: 665 - protein, 12 aa, Synthetic construct
RASQSVSSSYLA

SEQ ID NO: 666 - protein, 7 aa, Synthetic construct
GASSRAT

SEQ ID NO: 667 - protein, 9 aa, Synthetic construct
QQYGSSPLT

SEQ ID NO: 668 - protein, 116 aa, Synthetic construct
QVQLVESGGGVVQPGRSLRLSCAASGFTFSRYYMHWVRQAPGKCPEWVAVIWHDGSNKYYADSVKGRFTISRDNSKNTLYLQMNSLRAEDTAVYYCAREAPSLAYWGQGTLVTVSS

SEQ ID NO: 669 - protein, 108 aa, Synthetic construct
EIVLTQSPGTLSLSPGERATLSCRASQSVSSSYLAWYQQKPGQAPRLLIYGASSRATGIPDRFSGSGSGTDFTLTISRLEPEDFAVYYCQQYGSSPLTFGCGTKVEIK

SEQ ID NO: 670 - protein, 5 aa, Synthetic construct
RYYMH

SEQ ID NO: 671 - protein, 17 aa, Synthetic construct
VIWHDGSNKYYADSVKG

SEQ ID NO: 672 - protein, 7 aa, Synthetic construct
EAPSLAY

SEQ ID NO: 673 - protein, 12 aa, Synthetic construct
RASQSVSSSYLA

SEQ ID NO: 674 - protein, 7 aa, Synthetic construct
GASSRAT

SEQ ID NO: 675 - protein, 8 aa, Synthetic construct
QQYGSSIT

SEQ ID NO: 676 - protein, 116 aa, Synthetic construct; identical to SEQ ID NO: 668

SEQ ID NO: 677 - protein, 107 aa, Synthetic construct
EIVMTQSPGTLSLSPGERATLSCRASQSVSSSYLAWYQQKPGQAPRLLIYGASSRATGIPDRFSGSGSGTDFTLTISRLEPEDFAVYYCQQYGSSITFGCGTRLEIK

SEQ ID NO: 678 - protein, 5 aa, Synthetic construct
RYYMH

SEQ ID NO: 679 - protein, 17 aa, Synthetic construct
VIWHDGSNKYYADSVKG

SEQ ID NO: 680 - protein, 7 aa, Synthetic construct
EAPSLAY

SEQ ID NO: 681 - protein, 12 aa, Synthetic construct
RASQSVSSSYLA

SEQ ID NO: 682 - protein, 7 aa, Synthetic construct
GASSRAT

SEQ ID NO: 683 - protein, 9 aa, Synthetic construct
QQYGSSPWT

SEQ ID NO: 684 - protein, 116 aa, Synthetic construct; identical to SEQ ID NO: 668

SEQ ID NO: 685 - protein, 108 aa, Synthetic construct
EIVLTQSPGTLSLSPGERATLSCRASQSVSSSYLAWYQQKPGQAPRLLIYGASSRATGIPDRFSGSGSGTDFTLTISRLEPEDFAVYYCQQYGSSPWTFGCGTKVEIK

SEQ ID NO: 686 - protein, 5 aa, Synthetic construct
SYYWS

SEQ ID NO: 687 - protein, 16 aa, Synthetic construct
RVYTSGSTDYNPSLKS

SEQ ID NO: 688 - protein, 11 aa, Synthetic construct
DSGNFWGFLDH

SEQ ID NO: 689 - protein, 16 aa, Synthetic construct
RSSQSLLHSNGYNYLD

SEQ ID NO: 690 - protein, 7 aa, Synthetic construct
LGSNRAS

SEQ ID NO: 691 - protein, 9 aa, Synthetic construct
MQALQTPWT

SEQ ID NO: 692 - protein, 119 aa, Synthetic construct
QVQLQESGPGLVKPSETLSLTCTVSGGSISSYYWSWIRQPAGKCLEWIGRVYTSGSTDYNPSLKSRVTMSLDTSKSQFSLKLRSVTAADTAVYYCARDSGNFWGFLDHWGQGTLVTVSS

SEQ ID NO: 693 - protein, 112 aa, Synthetic construct
EIVLTQSPLSLPVTPGEPASISCRSSQSLLHSNGYNYLDWYLQKPGQSPQLLIYLGSNRASGVPDRFSGSGSGTDFTLKISRVEAEDVGIYYCMQALQTPWTFGCGTKVEIK

SEQ ID NO: 694 - protein, 5 aa, Synthetic construct
NYDMN

SEQ ID NO: 695 - protein, 17 aa, Synthetic construct
VISYDGSNKYYTDSVKG

SEQ ID NO: 696 - protein, 8 aa, Synthetic construct
RGATPFDY

SEQ ID NO: 697 - protein, 14 aa, Synthetic construct
TGTNSDVGSYNLVS

SEQ ID NO: 698 - protein, 7 aa, Synthetic construct
DVSHRPS

SEQ ID NO: 699 - protein, 10 aa, Synthetic construct
SSYISSSSLV

SEQ ID NO: 700 - protein, 117 aa, Synthetic construct
EVQLLESGGGLVQPGGSLRLSCAASGFTFRNYDMNWVRQAPGKCLEWVAVISYDGSNKYYTDSVKGRFTISRDNSRNTLYLQMNSLRTEDTAVYSCTKRGATPFDYWGQGTLVTVSS

SEQ ID NO: 701 - protein, 110 aa, Synthetic construct
QSALTQPPSVSGSPGQSITISCTGTNSDVGSYNLVSWYQQHPGKTPKLMIYDVSHRPSGVSNRFSGSKSGNTASLTISGLQAEDEADYYCSSYISSSSLVFGCGTKLTVL

SEQ ID NO: 702 - protein, 5 aa, Synthetic construct
NYDMN

SEQ ID NO: 703 - protein, 17 aa, Synthetic construct
VISYDGSQKSYSDSVKG

SEQ ID NO: 704 - protein, 8 aa, Synthetic construct
RGATPFDY

SEQ ID NO: 705 - protein, 11 aa, Synthetic construct
GGNNIGSKNVH

SEQ ID NO: 706 - protein, 7 aa, Synthetic construct
RDSKRPS

SEQ ID NO: 707 - protein, 9 aa, Synthetic construct
QAWDRSTAV

SEQ ID NO: 708 - protein, 117 aa, Synthetic construct
EVQLLESGGGSAQPGGSLRLSCVASGFTFRNYDMNWVRQAPGKCLEWVAVISYDGSQKSYSDSVKGRFTISRDNSKNTLSLQMNSLRNEDTAVYYCAKRGATPFDYWGQGTLVTVSS

SEQ ID NO: 709 - protein, 106 aa, Synthetic construct
SYELTQPPSVSVAPGQTARITCGGNNIGSKNVHWYQQKPGQAPVLVIYRDSKRPSGIPERFSGSNSGNTATLTISGTQAMDEADYYCQAWDRSTAVFGCGTKLTVL

SEQ ID NO: 710 - protein, 5 aa, Synthetic construct
NYDMN

SEQ ID NO: 711 - protein, 17 aa, Synthetic construct
VISYDGSNKYYSDSVKG

SEQ ID NO: 712 - protein, 8 aa, Synthetic construct
RGATPFDY

SEQ ID NO: 713 - protein, 14 aa, Synthetic construct
TGTSSDVGGYNYVS

SEQ ID NO: 714 - protein, 7 aa, Synthetic construct
DVSVRPS

SEQ ID NO: 715 - protein, 10 aa, Synthetic construct
SSYISSTTLV

SEQ ID NO: 716 - protein, 117 aa, Synthetic construct
QVQLVESGGGVVQPGRSLRLSCAASGFTFRNYDMNWVRQAPGKCLEWVAVISYDGSNKYYSDSVKGRFTISRDNSKNTLSLQMNSLRNEDTAVYYCAKRGATPFDYWGQGTLVTVSS

SEQ ID NO: 717 - protein, 110 aa, Synthetic construct
QSALTQPPSASGSPGQSITISCTGTSSDVGGYNYVSWYQQHPGKAPKLMIYDVSVRPSGVSNRFSGSKSGNTASLTISGLQAEDEADYYCSSYISSTTLVFGCGTKLTVL

SEQ ID NO: 718 - protein, 5 aa, Synthetic construct
NYDMN

SEQ ID NO: 719 - protein, 17 aa, Synthetic construct
VISYDGSQKSYSDSVKG

SEQ ID NO: 720 - protein, 8 aa, Synthetic construct
RGATPFDY

SEQ ID NO: 721 - protein, 14 aa, Synthetic construct
TGTSSDVGGYNYVS

SEQ ID NO: 722 - protein, 7 aa, Synthetic construct
DVSVRPS

SEQ ID NO: 723 - protein, 10 aa, Synthetic construct
SSYISSTTLV

SEQ ID NO: 724 - protein, 117 aa, Synthetic construct
QVQLVESGGGVVQPGRSLRLSCAASGFTFRNYDMNWVRQAPGKCLEWVAVISYDGSQKSYSDSVKGRFTISRDNSKNTLSLQMNSLRNEDTAVYYCAKRGATPFDYWGQGTLVTVSS

SEQ ID NO: 725 - protein, 110 aa, Synthetic construct; identical to SEQ ID NO: 717

SEQ ID NO: 726 - protein, 5 aa, Synthetic construct
GYYMH

SEQ ID NO: 727 - protein, 17 aa, Synthetic construct
WINPNSGGTNYAQKFQG

SEQ ID NO: 728 - protein, 10 aa, Synthetic construct
TGALAGALKH

SEQ ID NO: 729 - protein, 16 aa, Synthetic construct
RSSQSLLHSNGYNYLD

SEQ ID NO: 730 - protein, 7 aa, Synthetic construct
LGSNRAS

SEQ ID NO: 731 - protein, 9 aa, Synthetic construct
MQALQTPFT

SEQ ID NO: 732 - protein, 119 aa, Synthetic construct
QVQLVQSGAEVKKPGASVKVSCKASGYTFTGYYMHWVRQAPGQCLEWMGWINPNSGGTNYAQKFQGRITMTRDTSISTAYMELSRLRSDDTAVYYCARTGALAGALKHWGQGTLVTVSS

SEQ ID NO: 733 - protein, 112 aa, Synthetic construct
EIVMTQSPLSLPVTPGEPASISCRSSQSLLHSNGYNYLDWYLQKPGQSPQLLIYLGSNRASGVPDRFSGSGSGTDFTLKISRVEAEDVGVYYCMQALQTPFTFGCGTKVEIK

SEQ ID NO: 734 - protein, 5 aa, Synthetic construct
NYDMN

SEQ ID NO: 735 - protein, 17 aa, Synthetic construct
VISYDGSDKHYTDSVKG

SEQ ID NO: 736 - protein, 8 aa, Synthetic construct
RGATPVDY

SEQ ID NO: 737 - protein, 14 aa, Synthetic construct
TGTNSDVGGYNYVS

SEQ ID NO: 738 - protein, 7 aa, Synthetic construct
DVSKRPS

SEQ ID NO: 739 - protein, 10 aa, Synthetic construct
SSYISSSSLV

SEQ ID NO: 740 - protein, 117 aa, Synthetic construct; identical to SEQ ID NO: 492

SEQ ID NO: 741 - protein, 110 aa, Synthetic construct
QSALTQPASVSGSPGRSVTISCTGTNSDVGGYNYVSWYQQHPGKAPKLMIYDVSKRPSGVSNRFSGSKSGNTASLTISGLQAEDEADYYCSSYISSSSLVFGCGTKLTVL

SEQ ID NO: 742 - protein, 5 aa, Synthetic construct
NYDMN

SEQ ID NO: 743 - protein, 17 aa, Synthetic construct
VISYDGSQKSYSDSVKG

SEQ ID NO: 744 - protein, 8 aa, Synthetic construct
RGATPFDY

SEQ ID NO: 745 - protein, 11 aa, Synthetic construct
GGNNIGSKSVH

SEQ ID NO: 746 - protein, 7 aa, Synthetic construct
QDSKRPS

SEQ ID NO: 747 - protein, 9 aa, Synthetic construct
QAWDSSTAV

SEQ ID NO: 748 - protein, 117 aa, Synthetic construct; identical to SEQ ID NO: 724

SEQ ID NO: 749 - protein, 106 aa, Synthetic construct
SYELTQPPSVSVAPGQTARITCGGNNIGSKSVHWYQQKPGQSPVLVIYQDSKRPSGIPDRFSGSNSGNTATLTISGTQAMDEADYYCQAWDSSTAVFGCGTKLTVL

SEQ ID NO: 750 - protein, 7 aa, Synthetic construct
SNSAAWN

SEQ ID NO: 751 - protein, 18 aa, Synthetic construct
RTYYRSKWYNDYAVSVKS

SEQ ID NO: 752 - protein, 13 aa, Synthetic construct
AIFVVPAAMRFDY

SEQ ID NO: 753 - protein, 16 aa, Synthetic construct
RSSQSLLHSNGYNYLD

SEQ ID NO: 754 - protein, 7 aa, Synthetic construct
LGSNRAS

SEQ ID NO: 755 - protein, 8 aa, Synthetic construct
MQALQTPT

SEQ ID NO: 756 - protein, 125 aa, Synthetic construct
QVQLQQSGPGLVKPSQTLSLTCAISGDSVSSNSAAWNWIRQSPSRCLEWLGRTYYRSKWYNDYAVSVKSRITINPDISKNQFSLQLNSVTPEDTAVYYCARAIFVVPAAMRFDYWGQGTLVTVSS

SEQ ID NO: 757 - protein, 111 aa, Synthetic construct
EIVMTQSPLSLPVTPGEPASISCRSSQSLLHSNGYNYLDWYLQKPGQSPQLLIYLGSNRASGVPDRFSGSGSGTDFTLKISRVEAEDVGVYYCMQALQTPTFGCGTKVDIK

SEQ ID NO: 758 - protein, 5 aa, Synthetic construct
SNYMS

SEQ ID NO: 759 - protein, 16 aa, Synthetic construct
VIYSSGNTYYADSVKG

SEQ ID NO: 760 - protein, 8 aa, Synthetic construct
GSYYAFDI

SEQ ID NO: 761 - protein, 14 aa, Synthetic construct
GLSSGSVSTTYYPS

SEQ ID NO: 762 - protein, 7 aa, Synthetic construct
STNTRSS

SEQ ID NO: 763 - protein, 10 aa, Synthetic construct
VLYMGSGIWV

SEQ ID NO: 764 - protein, 116 aa, Synthetic construct
EVQLVESGGGLIQPGGSLRLSCAVSGFTVSSNYMSWVRQAPGKCLEWVSVIYSSGNTYYADSVKGRFTISRDNSKNTLYLQMNSLRAEDTAVYYCASGSYYAFDIWGQGTMVTVSS

SEQ ID NO: 765 - protein, 110 aa, Synthetic construct
QTVVTQEPSLTVSPGGTVTLTCGLSSGSVSTTYYPSWYQQTPGQAPRTLIYSTNTRSSGVPDRFSGSILGNKAALTITGAQADDESDYYCVLYMGSGIWVFGCGTKLTVL

SEQ ID NO: 766 - protein, 5 aa, Synthetic construct
NAWMS

SEQ ID NO: 767 - protein, 19 aa, Synthetic construct
RIKTKTDGGTTDYAAPVKG

SEQ ID NO: 768 - protein, 12 aa, Synthetic construct
DFRIMGATWFDP

SEQ ID NO: 769 - protein, 11 aa, Synthetic construct
SGDKLGDKYAS

SEQ ID NO: 770 - protein, 7 aa, Synthetic construct
QHSRRPS

SEQ ID NO: 771 - protein, 9 aa, Synthetic construct
QAWDSSTVV

SEQ ID NO: 772 - protein, 123 aa, Synthetic construct
EVQLVESGGGLVKPGGSLRLSCAASGFTFSNAWMSWVRQAPGKCLEWVGRIKTKTDGGTTDYAAPVKGRFTISRDDSKNTLYLQMNSLKTEDTAVYYCTTDFRIMGATWFDPWGQGTLVTVSS

SEQ ID NO: 773 - protein, 106 aa, Synthetic construct
SYELTQPPSVSVSPGQTASITCSGDKLGDKYASWYQQKPGQSPVLVIYQHSRRPSGIPERFSGSNSGNTATLTISGTQAMDEADYYCQAWDSSTVVFGCGTKLTVL

SEQ ID NO: 774 - protein, 5 aa, Synthetic construct
SYSMN

SEQ ID NO: 775 - protein, 17 aa, Synthetic construct
SISSRSSYIHYADSVKG

SEQ ID NO: 776 - protein, 8 aa, Synthetic construct
VQRAGLDY

SEQ ID NO: 777 - protein, 14 aa, Synthetic construct
TGSSSDVGNYNLVS

SEQ ID NO: 778 - protein, 7 aa, Synthetic construct
EVSNRPS

SEQ ID NO: 779 - protein, 10 aa, Synthetic construct
SSYTSSSTWV

SEQ ID NO: 780 - protein, 117 aa, Synthetic construct
EVQLVESGGGLVKPGGSLRLSCAASGFTFSSYSMNWVRQAPGKCLEWVSSISSRSSYIHYADSVKGRFTISRDNAKNSLNLQMNSLRAEDTAVYYCARVQRAGLDYWGQGTLVTVSS

SEQ ID NO: 781 - protein, 110 aa, Synthetic construct
QSALTQPASVSGSPGQSITISCTGSSSDVGNYNLVSWYQQHPGKAPKLMISEVSNRPSGVSDRFSGSKSGNTASLTISGLQAEDEADYYCSSYTSSSTWVFGCGTKLTVL

SEQ ID NO: 782 - protein, 7 aa, Synthetic construct
SSSYYWG

SEQ ID NO: 783 - protein, 16 aa, Synthetic construct
SIYYSGSTNYNPSLKS

SEQ ID NO: 784 - protein, 9 aa, Synthetic construct
PSNYDAFDI

SEQ ID NO: 785 - protein, 14 aa, Synthetic construct
TGSSSNIGAGYDVH

SEQ ID NO: 786 - protein, 7 aa, Synthetic construct
GNSNRPS

SEQ ID NO: 787 - protein, 11 aa, Synthetic construct
QSYDSSLGGWV

SEQ ID NO: 788 - protein, 119 aa, Synthetic construct
QVQLQESGPGLVKPSETLSLTCTVSGGSLSSSSYYWGWIRQPPGKCLEWIGSIYYSGSTNYNPSLKSRVTISADTSKNQFSLKLSSVTAADTAVYYCARPSNYDAFDIWGQGTMVTVSS

SEQ ID NO: 789 - protein, 111 aa, Synthetic construct
QSVLTQPPSVSGAPGQRVTISCTGSSSNIGAGYDVHWYQQLPGTAPKLLIYGNSNRPSGVPDRFSGSKSGTSASLAITGLQAEDEADYYCQSYDSSLGGWVFGCGTKLTVL

SEQ ID NO: 790 - protein, 7 aa, Synthetic construct
SGGFFWS

SEQ ID NO: 791 - protein, 16 aa, Synthetic construct
YIYYSGSTYYNPSLRS

SEQ ID NO: 792 - protein, 11 aa, Synthetic construct
DPGSYRVWFDP

SEQ ID NO: 793 - protein, 11 aa, Synthetic construct
RASQNIKNYLN

SEQ ID NO: 794 - protein, 7 aa, Synthetic construct
DASSLQS

SEQ ID NO: 795 - protein, 9 aa, Synthetic construct
QQSYSTPFT

SEQ ID NO: 796 - protein, 121 aa, Synthetic construct
QVQLQESGPGLVKPSQTLSLTCTVSGGSISSGGFFWSWIRQHPGKCLEWIGYIYYSGSTYYNPSLRSRVTISVDTSKNQFSLKLSSVTAADTAVYYCARDPGSYRVWFDPWGQGTLVTVSS

SEQ ID NO: 797 - protein, 107 aa, Synthetic construct
EIQMTQSPSSLSASVGDRVTITCRASQNIKNYLNWYQQKPGRAPKLLIYDASSLQSGDPSRFSGSGSGTDFTLTISSLQPEDFATYYCQQSYSTPFTFGCGTKVEIK

SEQ ID NO: 798 - protein, 5 aa, Synthetic construct
DHYMS

SEQ ID NO: 799 - protein, 17 aa, Synthetic construct
YISNSGSIIYYVDSVKG

SEQ ID NO: 800 - protein, 8 aa, Synthetic construct
DVRTAFDY

SEQ ID NO: 801 - protein, 11 aa, Synthetic construct
RASQSIGSWLA

SEQ ID NO: 802 - protein, 7 aa, Synthetic construct
AASSLQS

SEQ ID NO: 803 - protein, 9 aa, Synthetic construct
QQANSFPPT

SEQ ID NO: 804 - protein, 117 aa, Synthetic construct
QVQLVESGGGLVKPGGSLRLSCAASGFTFSDHYMSWIRQAPGKCLEWISYISNSGSIIYYVDSVKGRFTISRDNAKNSLYLQMNSLRAEDTAVYYCARDVRTAFDYWGQGTLVTVSS

SEQ ID NO: 805 - protein, 107 aa, Synthetic construct
EIQMTQSPSSVSASVGDRVTITCRASQSIGSWLAWYQQKPGKAPNLLIYAASSLQSGVPSRFSGSGSGTDFTLTISSLQPEDFATYYCQQANSFPPTFGCGTKVEIK

SEQ ID NO: 806 - protein, 7 aa, Synthetic construct
SSSYFWG

SEQ ID NO: 807 - protein, 16 aa, Synthetic construct
NIYYSGSSNYNPSLKS

SEQ ID NO: 808 - protein, 11 aa, Synthetic construct
LPRGDRDAFDI

SEQ ID NO: 809 - protein, 11 aa, Synthetic construct
RASQGISNYLA

SEQ ID NO: 810 - protein, 7 aa, Synthetic construct
AASTLQS

SEQ ID NO: 811 - protein, 9 aa, Synthetic construct
QQSYSTPFT

SEQ ID NO: 812 - protein, 121 aa, Synthetic construct; identical to SEQ ID NO: 92

SEQ ID NO: 813 - protein, 107 aa, Synthetic construct; identical to SEQ ID NO: 94

SEQ ID NO: 814 - protein, 7 aa, Synthetic construct
SSSYFWG

SEQ ID NO: 815 - protein, 16 aa, Synthetic construct
NIYYSGSSNYNPSLKS

SEQ ID NO: 816 - protein, 11 aa, Synthetic construct
LPRGDRDAFDI

SEQ ID NO: 817 - protein, 11 aa, Synthetic construct
RASQGISNYLA

SEQ ID NO: 818 - protein, 7 aa, Synthetic construct
AASTLQS

SEQ ID NO: 819 - protein, 9 aa, Synthetic construct
QQSYSTPFT

SEQ ID NO: 820 - protein, 121 aa, Synthetic construct; identical to SEQ ID NO: 92

SEQ ID NO: 821 - protein, 107 aa, Synthetic construct
EIQMTQSPSSLSASVGDRVTITCRASQGISNYLAWYQQKPGKVPKLLIYAASTLQSGVPSRFSGSGSGTDFTLTISSLQPEDFATYYCQQSYSTPFTFGCGTKVEIK

SEQ ID NO: 822 - protein, 7 aa, Synthetic construct
SGGHFWS

SEQ ID NO: 823 - protein, 16 aa, Synthetic construct
YIYYSGSTYSTPSLTS

SEQ ID NO: 824 - protein, 9 aa, Synthetic construct
EGQSGSFDI

SEQ ID NO: 825 - protein, 14 aa, Synthetic construct
TGTSSDVGGSDYVS

SEQ ID NO: 826 - protein, 7 aa, Synthetic construct
EVSNRPS

SEQ ID NO: 827 - protein, 10 aa, Synthetic construct
SSYTTTGTLV

SEQ ID NO: 828 - protein, 119 aa, Synthetic construct
QVQLQESGPGLVKPSQTLSLTCTVSGGSISSGGHFWSWIRQHPGKCLEWIGYIYYSGSTYSTPSLTSRVTMSRDTSKNQFSLKLSSVTAADTAVYYCAREGQSGSFDIWGQGTMVTVSS

SEQ ID NO: 829 - protein, 110 aa, Synthetic construct
QSALTQPASVSGSPGQSITISCTGTSSDVGGSDYVSWYRQHPGKAPKLIIYEVSNRPSGVSNRFSGSKSGNTASLTISGLQAEDEADYYCSSYTTTGTLVFGCGTKLTVL

SEQ ID NO: 830 - protein, 5 aa, Synthetic construct
SYGMH

SEQ ID NO: 831 - protein, 17 aa, Synthetic construct
VIWKDGNNKYYADSVKG

SEQ ID NO: 832 - protein, 10 aa, Synthetic construct
GLNYYYGMDV

SEQ ID NO: 833 - protein, 13 aa, Synthetic construct
TRSNGGIANNYVQ

SEQ ID NO: 834 - protein, 7 aa, Synthetic construct
ENNQRPS

SEQ ID NO: 835 - protein, 10 aa, Synthetic construct
QSYDGSHHVV

SEQ ID NO: 836 - protein, 119 aa, Synthetic construct
QVQLVESGGGVVQPGRSLRLSCAASGFTFSSYGMHWVRQAPGKCLEWVAVIWKDGNNKYYADSVKGRFTISRDNSKNTLYLQMNSLRAEDTAVYYCARGLNYYYGMDVWGQGTTVTVSS

SEQ ID NO: 837 - protein, 111 aa, Synthetic construct
NFMLTQPHSVSESPGKTATISCTRSNGGIANNYVQWYQQRPGSSPTIVIYENNQRPSGVPDRFSGSIDSSSNSASLTISGLKTEDEADYYCQSYDGSHHVVFGCGTKLTVL

SEQ ID NO: 838 - protein, 5 aa, Synthetic construct
GYYIH

SEQ ID NO: 839 - protein, 17 aa, Synthetic construct
WINPKSGGTHYAQKFQG

SEQ ID NO: 840 - protein, 19 aa, Synthetic construct
AEARLAARQEYYYFYGMDV

SEQ ID NO: 841 - protein, 11 aa, Synthetic construct
SGDKLGDKYAS

SEQ ID NO: 842 - protein, 7 aa, Synthetic construct
QDSKRPS

SEQ ID NO: 843 - protein, 9 aa, Synthetic construct
QAWDSSTVV

SEQ ID NO: 844 - protein, 128 aa, Synthetic construct
QVQLVQSGAEVKKPGASVKVSCKASGYTFTGYYIHWVRQAPGQCLEWMGWINPKSGGTHYAQKFQGRVTMTRDTSISTAYMELSRLRSDDTAVYYCARAEARLAARQEYYYFYGMDVWGQGTTVTVSS

SEQ ID NO: 845 - protein, 106 aa, Synthetic construct
SYELTQPASVSVSPGQTASITCSGDKLGDKYASWYQQKPGQSPVLVIYQDSKRPSGIPERFSGSNSGNTATLTISGTQAMDEADYYCQAWDSSTVVFGCGTKLTVL

SEQ ID NO: 846 - protein, 7 aa, Synthetic construct
SGAYFWS

SEQ ID NO: 847 - protein, 16 aa, Synthetic construct
YIYYSGSTYTNPSLRD

SEQ ID NO: 848 - protein, 9 aa, Synthetic construct
EGAGYVFDI

SEQ ID NO: 849 - protein, 14 aa, Synthetic construct
TGTSSDVGGYNYVS

SEQ ID NO: 850 - protein, 7 aa, Synthetic construct
EVSNRPS

SEQ ID NO: 851 - protein, 11 aa, Synthetic construct
QVWDSSSDHVV

SEQ ID NO: 852 - protein, 119 aa, Synthetic construct
QVQLQESGPGLVKPSQTLSLTCTVSGGSISSGAYFWSWIRQHPGKCLEWIGYIYYSGSTYTNPSLRDRLKISVDTSKNQFSLKLSSVTAADTAMYYCAREGAGYVFDIWGQGTMVTVSS

SEQ ID NO: 853 - protein, 111 aa, Synthetic construct
QSALTQPASVSGSPGQSITISCTGTSSDVGGYNYVSWYQQHPGKAPKLMIYEVSNRPSGVSNRFSGSKSGNTASLTISGLQAGDEADYFCQVWDSSSDHVVFGCGTKLTVL

SEQ ID NO: 854 - protein, 7 aa, Synthetic construct
SGGYYWN

SEQ ID NO: 855 - protein, 16 aa, Synthetic construct
YIFYSGITYSNPSLKS

SEQ ID NO: 856 - protein, 12 aa, Synthetic construct
GLVRGAPDAFDI

SEQ ID NO: 857 - protein, 11 aa, Synthetic construct
QASQDISNYLN

SEQ ID NO: 858 - protein, 7 aa, Synthetic construct
AASSLQG

SEQ ID NO: 859 - protein, 9 aa, Synthetic construct
QQSYSTPFT

SEQ ID NO: 860 - protein, 122 aa, Synthetic construct
QVQLQESGPGLVKPSQTLSLTCTVSGGSISSGGYYWNWIRQHPGQCLEWIGYIFYSGITYSNPSLKSLFTISLDTSKNQFSLKLSSVTAADTAVYYCARGLVRGAPDAFDIWGQGTMVTVSS

SEQ ID NO: 861 - protein, 107 aa, Synthetic construct
EIQMTQSPSSLSASVGDRVTITCQASQDISNYLNWYQLKPGKAPKLLIQAASSLQGGVPSRFSGSGSGTDFTLTISSLQPEDFATYYCQQSYSTPFTFGCGTKVEIK

SEQ ID NO: 862 - protein, 5 aa, Synthetic construct
SYYWS

SEQ ID NO: 863 - protein, 16 aa, Synthetic construct
RIYYNGNTYYNPSLKS

SEQ ID NO: 864 - protein, 10 aa, Synthetic construct
PKLGIDAFDI

SEQ ID NO: 865 - protein, 14 aa, Synthetic construct
TGSSSNIGAGYDVH

SEQ ID NO: 866 - protein, 7 aa, Synthetic construct
GNSNRPS

SEQ ID NO: 867 - protein, 11 aa, Synthetic construct
QSHDSSLSGSV

SEQ ID NO: 868 - protein, 118 aa, Synthetic construct
QVQLQESGPGLVKPSETLSLTCTVSGGSISSYYWSWIRQPPGKCLEWIGRIYYNGNTYYNPSLKSRVTISGDTSKNQFSLKLSSVTAADTAVYYCARPKLGIDAFDIWGQGTMVTVSS

SEQ ID NO: 869 - protein, 111 aa, Synthetic construct
QSVLTQPPSVSGAPGQRVTISCTGSSSNIGAGYDVHWYQKLPGTAPKLLIYGNSNRPSGVPDRFSGSKSGTSASLAITGLQAEDEADYYCQSHDSSLSGSVFGCGTKLTVL

SEQ ID NO: 870 - protein, 7 aa, Synthetic construct
SGGYFWS

SEQ ID NO: 871 - protein, 16 aa, Synthetic construct
YIYYSGSTYTNPSLRD

SEQ ID NO: 872 - protein, 9 aa, Synthetic construct
EGAGYAFDI

SEQ ID NO: 873 - protein, 14 aa, Synthetic construct
TGTSSDVGGYNYVS

SEQ ID NO: 874 - protein, 7 aa, Synthetic construct
EVSNRPS

SEQ ID NO: 875 - protein, 10 aa, Synthetic construct
SSYTSSSTLV

SEQ ID NO: 876 - protein, 119 aa, Synthetic construct
QVQLQESGGGLVKPSETLSLTCTVSGGSISSGGYFWSWIRQHPGKCLEWIGYIYYSGSTYTNPSLRDRLKISVDTSKNQFSLKLSSVTAADTAMYYCAREGAGYAFDIWGQGTMVTVSS

SEQ ID NO: 877 - protein, 110 aa, Synthetic construct
QSALTQPASVSGSPGQSITISCTGTSSDVGGYNYVSWYQQHPGKAPKLMIYEVSNRPSGVSNRFSGSKSGNTASLTISGLQAEDEADYYCSSYTSSSTLVFGCGTKLTVL

SEQ ID NO: 878 - protein, 5 aa, Synthetic construct
SYGMH

SEQ ID NO: 879 - protein, 17 aa, Synthetic construct
VISYDGSNKYYADSVKG

SEQ ID NO: 880 - protein, 21 aa, Synthetic construct
EGAYFGSGSYYPLYYYYAMDV

SEQ ID NO: 881 - protein, 12 aa, Synthetic construct
RASQSVSSSYLA

SEQ ID NO: 882 - protein, 7 aa, Synthetic construct
GASIRAT

SEQ ID NO: 883 - protein, 9 aa, Synthetic construct
QQYGSSLFT

SEQ ID NO: 884 - protein, 130 aa, Synthetic construct
QVQLVESGGGVVQPGRSLRLSCAASGFTFSSYGMHWVRQAPGKCLEWVAVISYDGSNKYYADSVKGRFTISRDNSKNTLYLQMNSLRAEDTAVYYCAREGAYFGSGSYYPLYYYYAMDVWGQGTTVTVSS

SEQ ID NO: 885 - protein, 108 aa, Synthetic construct
EIVMTQSPGTLSLSPGERATLSCRASQSVSSSYLAWYQQKPGQAPRLLIYGASIRATGIPDRFSGSGSGTDFTLTISRLEPEDFAVYYCQQYGSSLFTFGCGTRLEIK

SEQ ID NO: 886 - protein, 5 aa, Synthetic construct
DHYMS

SEQ ID NO: 887 - protein, 17 aa, Synthetic construct
YISSSGSTIYYVDSVKG

SEQ ID NO: 888 - protein, 8 aa, Synthetic construct
DVRTAFDY

SEQ ID NO: 889 - protein, 11 aa, Synthetic construct
RASQGISSWLA

SEQ ID NO: 890 - protein, 7 aa, Synthetic construct
AASGLQS

SEQ ID NO: 891 - protein, 9 aa, Synthetic construct
QQANSFPPT

SEQ ID NO: 892 - protein, 117 aa, Synthetic construct
QVQLVESGGGLVKPGGSLRLSCAASGFTFSDHYMSWIRQTPGKCLEWVSYISSSGSTIYYVDSVKGRFTISRDNAKNSLYLQMNSLRAEDTAVYYCARDVRTAFDYWGQGTLVTVSS

SEQ ID NO: 893 - protein, 107 aa, Synthetic construct
EIQMTQSPSSVSASVGDRVTITCRASQGISSWLAWYQQKPGKAPKLLIYAASGLQSGVPSRFSGSGSGTDFTLTISSLQPEDFATYYCQQANSFPPTFGCGTKVEIK

SEQ ID NO: 894 - protein, 5 aa, Synthetic construct
SYTMS

SEQ ID NO: 895 - protein, 17 aa, Synthetic construct
AISGSGGNTYYADSVKG

SEQ ID NO: 896 - protein, 8 aa, Synthetic construct
VGRAALDY

SEQ ID NO: 897 - protein, 14 aa, Synthetic construct
TGTSSDVGSYNLVS

SEQ ID NO: 898 - protein, 7 aa, Synthetic construct
EVSKRPS

SEQ ID NO: 899 - protein, 10 aa, Synthetic construct
SSYTSSSTVV

SEQ ID NO: 900 - protein, 117 aa, Synthetic construct
EVQLLESGGGLVQPGGSPRLSCAVSGFTFSSYTMSWVRQAPGKCLEWVSAISGSGGNTYYADSVKGRSTISRDNSRNTLYLQMNSLRAEDTAVYYCAKVGRAALDYWGQGTLVTVSS

SEQ ID NO: 901 - protein, 110 aa, Synthetic construct
QSALTQPPSVSGSPGQSITISCTGTSSDVGSYNLVSWYQQHPGKAPKLMIYEVSKRPSGVSNRFSGSKSGNTASLTISGLQAEDEADYYCSSYTSSSTVVFGCGTKLTVL

SEQ ID NO: 902 - protein, 5 aa, Synthetic construct
SYAMS

SEQ ID NO: 903 - protein, 17 aa, Synthetic construct
AISGSGGSTYYADSVKG

SEQ ID NO: 904 - protein, 19 aa, Synthetic construct
EGYYDSSGYPLYYYFGMDV

SEQ ID NO: 905 - protein, 12 aa, Synthetic construct
RASQSVSSSYLA

SEQ ID NO: 906 - protein, 7 aa, Synthetic construct
GASSRAT

SEQ ID NO: 907 - protein, 10 aa, Synthetic construct
QRYGSSPIFT

SEQ ID NO: 908 - protein, 128 aa, Synthetic construct
EVQLLESGGGLVQPGGSLRLSCAASGFTFSSYAMSWVRQAPGKCLEWVSAISGSGGSTYYADSVKGRFTISRDNSKNTLYLQMNSLRAEDTAVYYCAREGYYDSSGYPLYYYFGMDVWGQGTTVTVSS

SEQ ID NO: 909 - protein, 109 aa, Synthetic construct
EIVLTQSPGTLSLSPGERATLSCRASQSVSSSYLAWYQQKPGQAPRLLIYGASSRATGIPDRFSGSGSGTDFTLTISRLEPEDFAVYYCQRYGSSPIFTFGCGTKVEIK

SEQ ID NO: 910 - protein, 5 aa, Synthetic construct
NAWMS

SEQ ID NO: 911 - protein, 19 aa, Synthetic construct
RIKTKTDGGTTDYAAPVKG

SEQ ID NO: 912 - protein, 12 aa, Synthetic construct
DFRIMGATWFDP

SEQ ID NO: 913 - protein, 13 aa, Synthetic construct
SGSSSNIGSYSVN

SEQ ID NO: 914 - protein, 7 aa, Synthetic construct
SNNQRPS

SEQ ID NO: 915 - protein, 13 aa, Synthetic construct
AAWDDSLSGRGVA

SEQ ID NO: 916 - protein, 123 aa, Synthetic construct; identical to SEQ ID NO: 772

SEQ ID NO: 917 - protein, 112 aa, Synthetic construct
QSVLTQPSSASGTPGQRVTISCSGSSSNIGSYSVNWYQQLPGTAPKLLIYSNNQRPSGVPDRFSGSKSGTSASLAISGLRSEDEADYYCAAWDDSLSGRGVAFGCGTKLTVL

SEQ ID NO: 918 - protein, 5 aa, Synthetic construct
DYYMS

SEQ ID NO: 919 - protein, 17 aa, Synthetic construct
YISSSGSMIYYIDSVKG

SEQ ID NO: 920 - protein, 8 aa, Synthetic construct
DLGPSFDY

SEQ ID NO: 921 - protein, 11 aa, Synthetic construct
RASQGIGSWLA

SEQ ID NO: 922 - protein, 7 aa, Synthetic construct
GASGLQS

SEQ ID NO: 923 - protein, 9 aa, Synthetic construct
QQANSFPRT

SEQ ID NO: 924 - protein, 117 aa, Synthetic construct
QVQLVESGGGLVKPGGSLRLSCAASGFTFSDYYMSWIRQAPGKCLEWISYISSSGSMIYYIDSVKGRFTISRDNAKNSLYLQMNSLRAEDTAVYYCARDLGPSFDYWGQGSLVTVSS

SEQ ID NO: 925 - protein, 107 aa, Synthetic construct
EIQMTQSPSSVAATVGDRVTITCRASQGIGSWLAWYQQKPGKAPKLLIYGASGLQSGVPSRFSGSGSGTDFTLTISSLQPEDFATYYCQQANSFPRTFGCGTKVEIK

SEQ ID NO: 926 - protein, 5 aa, Synthetic construct
DHYMS

SEQ ID NO: 927 - protein, 17 aa, Synthetic construct
YISNSGSTIYYADSVKG

SEQ ID NO: 928 - protein, 8 aa, Synthetic construct
DQRNAFDI

SEQ ID NO: 929 - protein, 11 aa, Synthetic construct
RASQGIGSWLA

SEQ ID NO: 930 - protein, 7 aa, Synthetic construct
AASGLQS

SEQ ID NO: 931 - protein, 9 aa, Synthetic construct
QQSYSNPLT

SEQ ID NO: 932 - protein, 117 aa, Synthetic construct
QVQLVESGGGLVKPGGSLRLSCAASGFTFSDHYMSWIRQAPGKCLEWISYISNSGSTIYYADSVKGRFTISRDNAKNSLYLQMNSLRAEDTAVYYCARDQRNAFDIWGQGTMVTVSS

SEQ ID NO: 933 - protein, 107 aa, Synthetic construct
AIQMTQSPSSLSASVGDRVTITCRASQGIGSWLAWYQQKPGKAPKLLIYAASGLQSGVPSRFSGSGSGTDFTLTISSLQPEDFATYYCQQSYSNPLTFGCGTKVEIK

SEQ ID NO: 934 - protein, 7 aa, Synthetic construct
SSSYYWG

SEQ ID NO: 935 - protein, 16 aa, Synthetic construct
SIYYSGTTRYNPSLRS

SEQ ID NO: 936 - protein, 10 aa, Synthetic construct
PGAGHDGFDI

SEQ ID NO: 937 - protein, 13 aa, Synthetic construct
SGSSSNIGSNYVY

SEQ ID NO: 938 - protein, 7 aa, Synthetic construct
DNNKRPS

SEQ ID NO: 939 - protein, 11 aa, Synthetic construct
AAWDDSLSGWV

SEQ ID NO: 940 - protein, 120 aa, Synthetic construct
QVQLQESGPGLLKPSETLSLTCTVSGGSISSSSYYWGWIRQPPGKCLEWIGSIYYSGTTRYNPSLRSRVTTSLDASKNRLSLQLSSVTAADTAVYYCARPGAGHDGFDIWGQGTMVTVSS

SEQ ID NO: 941 - protein, 110 aa, Synthetic construct
QSVLTQPPSASGTPGQRVTISCSGSSSNIGSNYVYWYQQLPGTAPKLLIYDNNKRPSGIPDRFSGSKSGTSASLAISGLRSEDEADYYCAAWDDSLSGWVFGCGTKLTVL

SEQ ID NO: 942 - protein, 5 aa, Synthetic construct
SYYWS

SEQ ID NO: 943 - protein, 16 aa, Synthetic construct
RIYSSGSANYNPSLKS

SEQ ID NO: 944 - protein, 17 aa, Synthetic construct
EGQWRVPAQYYYFGMDV

SEQ ID NO: 945 - protein, 12 aa, Synthetic construct
RASQSVSSSYLA

SEQ ID NO: 946 - protein, 7 aa, Synthetic construct
GASSRAT

SEQ ID NO: 947 - protein, 8 aa, Synthetic construct
QQYGSSIT

SEQ ID NO: 948 - protein, 125 aa, Synthetic construct
QVQLQESGPGLVKPSETLSLTCTVSGGSISSYYWSWIRQPAGKCLEWIGRIYSSGSANYNPSLKSRVTMSVDTSKNQFSLKLNSVTAADTAVYYCAREGQWRVPAQYYYFGMDVWGQGTTVTVSS

SEQ ID NO: 949 - protein, 107 aa, Synthetic construct; identical to SEQ ID NO: 677

SEQ ID NO: 950 - protein, 7 aa, Synthetic construct
SSSYFWV

SEQ ID NO: 951 - protein, 16 aa, Synthetic construct
SIYYSGSTYYNPSLKS

SEQ ID NO: 952 - protein, 11 aa, Synthetic construct
LPRGDRMTFDI

SEQ ID NO: 953 - protein, 12 aa, Synthetic construct
RASQSVSSSYLA

SEQ ID NO: 954 - protein, 7 aa, Synthetic construct
GASSRAT

SEQ ID NO: 955 - protein, 9 aa, Synthetic construct
QQYGSSPFT

SEQ ID NO: 956 - protein, 121 aa, Synthetic construct; identical to SEQ ID NO: 101

SEQ ID NO: 957 - protein, 108 aa, Synthetic construct; identical to SEQ ID NO: 102

SEQ ID NO: 958 - protein, 5 aa, Synthetic construct
SYGMH

SEQ ID NO: 959 - protein, 17 aa, Synthetic construct
VIWNRYSNKYYADAVKG

SEQ ID NO: 960 - protein, 10 aa, Synthetic construct
DVPYYYGMDV

SEQ ID NO: 961 - protein, 13 aa, Synthetic construct
TRSSGSIGDNYVQ

SEQ ID NO: 962 - protein, 7 aa, Synthetic construct
ENNQRPS

SEQ ID NO: 963 - protein, 9 aa, Synthetic construct
QSYHGSNVV

SEQ ID NO: 964 - protein, 119 aa, Synthetic construct
QVQLVESGGGVVLPGRSLRLSCAASGFPFSSYGMHWVRQAPGKCLEWVAVIWNRYSNKYYADAVKGRFTISRDNSKNTLYLQMNSLRAEDTAVYYCARDVPYYYGMDVWGQGTTVTVSS

SEQ ID NO: 965 - protein, 110 aa, Synthetic construct
NFMLTQPHSVSESPGKTVIISCTRSSGSIGDNYVQWYQQRPGSSPTTVIYENNQRPSGVPDRFSGSIDSSSNSASLTISGLKTEDEADYYCQSYHGSNVVFGCGTKLTVL

SEQ ID NO: 966 - protein, 5 aa, Synthetic construct
SYGMH

SEQ ID NO: 967 - protein, 17 aa, Synthetic construct
VIWNDASNKYYADAVKG

SEQ ID NO: 968 - protein, 10 aa, Synthetic construct
DVPYYYGMDV

SEQ ID NO: 969 - protein, 13 aa, Synthetic construct
TRSSGSIGDNYVQ

SEQ ID NO: 970 - protein, 7 aa, Synthetic construct
ENNQRPS

SEQ ID NO: 971 - protein, 9 aa, Synthetic construct
QSYQQSNVV

SEQ ID NO: 972 - protein, 119 aa, Synthetic construct
QVQLVESGGGVVLPGRSLRLSCAASGFPFSSYGMHWVRQAPGKCLEWVAVIWNDASNKYYADAVKGRFTISRDNSKNTLYLQMNSLRAEDTAVYYCARDVPYYYGMDVWGQGTTVTVSS

SEQ ID NO: 973 - protein, 110 aa, Synthetic construct
NFMLTQPHSVSESPGKTVIISCTRSSGSIGDNYVQWYQQRPGSSPTTVIYENNQRPSGVPDRFSGSIDSSSNSASLTISGLKTEDEADYYCQSYQQSNVVFGCGTKLTVL

SEQ ID NO: 974 - protein, 5 aa, Synthetic construct
SYAMS

SEQ ID NO: 975 - protein, 17 aa, Synthetic construct
AISGSGEFSYYAAAVKG

SEQ ID NO: 976 - protein, 12 aa, Synthetic construct
VRNYYGSGSLDY

SEQ ID NO: 977 - protein, 12 aa, Synthetic construct
RASQSVSSTYLA

SEQ ID NO: 978 - protein, 7 aa, Synthetic construct
GASIRAT

SEQ ID NO: 979 - protein, 8 aa, Synthetic construct
QQYGSSLT

SEQ ID NO: 980 - protein, 121 aa, Synthetic construct; identical to SEQ ID NO: 141

SEQ ID NO: 981 - protein, 107 aa, Synthetic construct; identical to SEQ ID NO: 118

SEQ ID NO: 982 - protein, 5 aa, Synthetic construct
SYAMS

SEQ ID NO: 983 - protein, 17 aa, Synthetic construct
AISGSGEQWYYAPSVKG

SEQ ID NO: 984 - protein, 12 aa, Synthetic construct
VRNYYGSGSLDY

SEQ ID NO: 985 - protein, 12 aa, Synthetic construct
RASQSFSSAYLA

SEQ ID NO: 986 - protein, 7 aa, Synthetic construct
GASIRAT

SEQ ID NO: 987 - protein, 8 aa, Synthetic construct
QQYGSSLT

SEQ ID NO: 988 - protein, 121 aa, Synthetic construct; identical to SEQ ID NO: 109

SEQ ID NO: 989 - protein, 107 aa, Synthetic construct; identical to SEQ ID NO: 110

SEQ ID NO: 990 - protein, 5 aa, Synthetic construct
SYAMS

SEQ ID NO: 991 - protein, 17 aa, Synthetic construct
AISGSGGSTYYAPSVKG

SEQ ID NO: 992 - protein, 19 aa, Synthetic construct
EGYYPVSGYPLYYYFGMDV

SEQ ID NO: 993 - protein, 12 aa, Synthetic construct
RASQSVSSSYLA

SEQ ID NO: 994 - protein, 7 aa, Synthetic construct
GASSRAT

SEQ ID NO: 995 - protein, 10 aa, Synthetic construct
QQYGSSPIFT

SEQ ID NO: 996 - protein, 128 aa, Synthetic construct
EVQLLESGGGLVQPGGSLRLSCAASGFTFSSYAMSWVRQAPGKCLEWVSAISGSGGSTYYAPSVKGRFTISRDNSKNTLYLQMNSLRAEDTAVYYCAKEGYYPVSGYPLYYYFGMDVWGQGTTVTVSS

SEQ ID NO: 997 - protein, 109 aa, Synthetic construct; identical to SEQ ID NO: 126

SEQ ID NO: 998 - protein, 5 aa, Synthetic construct
SYAMS

SEQ ID NO: 999 - protein, 17 aa, Synthetic construct
AISGSGGSTYYAGNVKG

SEQ ID NO: 1000 - protein, 19 aa, Synthetic construct
EGYYPTSGYPLYYYFGMDV

SEQ ID NO: 1001 - protein, 12 aa, Synthetic construct
RASQSVSSSYLA

SEQ ID NO: 1002 - protein, 7 aa, Synthetic construct
GASSRAT

SEQ ID NO: 1003 - protein, 10 aa, Synthetic construct
QQYGSSPIFT

SEQ ID NO: 1004 - protein, 128 aa, Synthetic construct
EVQLLESGGGLVQPGGSLRLSCAASGFTFSSYAMSWVRQAPGKCLEWVSAISGSGGSTYYAGNVKGRFTISRDNSKNTLYLQMNSLRAEDTAVYYCAKEGYYPTSGYPLYYYFGMDVWGQGTTVTVSS

SEQ ID NO: 1005 - protein, 109 aa, Synthetic construct; identical to SEQ ID NO: 126

SEQ ID NO: 1006 - protein, 5 aa, Synthetic construct
SYGMH

SEQ ID NO: 1007 - protein, 17 aa, Synthetic construct
VIGSRESNKNYAESVKG

SEQ ID NO: 1008 - protein, 17 aa, Synthetic construct
ALRIAVAASYYYYGLDV

SEQ ID NO: 1009 - protein, 11 aa, Synthetic construct
RASQSVRSFLN

SEQ ID NO: 1010 - protein, 7 aa, Synthetic construct
TASSLQS

SEQ ID NO: 1011 - protein, 9 aa, Synthetic construct
QQSYEMPIT

SEQ ID NO: 1012 - protein, 126 aa, Synthetic construct
QVQLVESGGGVVQPGRSLRLSCAASGFTFSSYGMHWVRQAPGKCLEWVAVIGSRESNKNYAESVKGRFTISRDNSKNTLYLQMNSLRAEDTAVYYCASALRIAVAASYYYYGLDVWGQGTTVTVSS

SEQ ID NO: 1013 - protein, 107 aa, Synthetic construct
EIQMTQSPSSLSASVGDRVTITCRASQSVRSFLNWYQQKPGKAPKLLIFTASSLQSGVPSRFSGSGSGTDFTLTISSLQPEDFATYYCQQSYEMPITFGCGTRLEIK

SEQ ID NO: 1014 - protein, 5 aa, Synthetic construct
SYGMG

SEQ ID NO: 1015 - protein, 17 aa, Synthetic construct
VISYEASNKYYAEAVKG

SEQ ID NO: 1016 - protein, 21 aa, Synthetic construct
EGAHFGSGSYYPLYYYYAMDV

SEQ ID NO: 1017 - protein, 12 aa, Synthetic construct
RASQSVSSSYLA

SEQ ID NO: 1018 - protein, 7 aa, Synthetic construct
GASIRAT

SEQ ID NO: 1019 - protein, 10 aa, Synthetic construct
QQYGSSPIFT

SEQ ID NO: 1020 - protein, 130 aa, Synthetic construct
QVQLVESGGGVVQPGRSLRLSCAASGFTFSSYGMGWVRQAPGKCLEWVAVISYEASNKYYAEAVKGRFTISRDNSKNTLYLQMNSLRAEDTAVYYCAREGAHFGSGSYYPLYYYYAMDVWGQGTTVTVSS

SEQ ID NO: 1021 - protein, 109 aa, Synthetic construct
EIVLTQSPGTLSLSPGERATLSCRASQSVSSSYLAWYQQKPGQAPRLLIYGASIRATGIPDRFSGSGSGTDFTLTISRLEPEDFAVYYCQQYGSSPIFTFGCGTKVEIK

SEQ ID NO: 1022 - protein, 5 aa, Synthetic construct
DYYMT

SEQ ID NO: 1023 - protein, 17 aa, Synthetic construct
YISSSGSTIYYAEAVKG

SEQ ID NO: 1024 - protein, 8 aa, Synthetic construct
DRNSHFDY

SEQ ID NO: 1025 - protein, 11 aa, Synthetic construct
RASQGIRTWLA

SEQ ID NO: 1026 - protein, 7 aa, Synthetic construct
GASGLQS

SEQ ID NO: 1027 - protein, 9 aa, Synthetic construct
QQAESFPRT

SEQ ID NO: 1028 - protein, 117 aa, Synthetic construct; identical to SEQ ID NO: 83

SEQ ID NO: 1029 - protein, 107 aa, Synthetic construct
EIQMTQSPSSVSASVGDRVTITCRASQGIRTWLAWYQQKPGKAPKLLIYGASGLQSGVPSRFSGSGSGTDFTLTISSLQPEDFATYYCQQAESFPRTFGCGTKVEIK

SEQ ID NO: 1030 - protein, 5 aa, Synthetic construct
GYYIH

SEQ ID NO: 1031 - protein, 17 aa, Synthetic construct
WINPNSGGTNYAQKFQG

SEQ ID NO: 1032 - protein, 17 aa, Synthetic construct
VEAVAGREYYYFSGMDV

SEQ ID NO: 1033 - protein, 11 aa, Synthetic construct
SGEKLGDKYVY

SEQ ID NO: 1034 - protein, 7 aa, Synthetic construct
QSTKRPS

SEQ ID NO: 1035 - protein, 9 aa, Synthetic construct
QAYHASTAV

SEQ ID NO: 1036 - protein, 126 aa, Synthetic construct; identical to SEQ ID NO: 149

SEQ ID NO: 1037 - protein, 106 aa, Synthetic construct; identical to SEQ ID NO: 150

SEQ ID NO: 1038 - protein, 5 aa, Synthetic construct
SYAMS

SEQ ID NO: 1039 - protein, 17 aa, Synthetic construct
AISGSGEFSYYAAAVKG

SEQ ID NO: 1040 - protein, 12 aa, Synthetic construct
VRNYYGSGSLDY

SEQ ID NO: 1041 - protein, 12 aa, Synthetic construct
RASQSVSSTYLA

SEQ ID NO: 1042 - protein, 7 aa, Synthetic construct
GASIRAT

SEQ ID NO: 1043 - protein, 8 aa, Synthetic construct
QQYQSSLT

SEQ ID NO: 1044 - protein, 121 aa, Synthetic construct; identical to SEQ ID NO: 141

SEQ ID NO: 1045 - protein, 107 aa, Synthetic construct; identical to SEQ ID NO: 142

SEQ ID NO: 1046 - protein, 5 aa, Synthetic construct
SYGMH

SEQ ID NO: 1047 - protein, 17 aa, Synthetic construct
FIWYEGSNKYYAESVKD

SEQ ID NO: 1048 - protein, 16 aa, Synthetic construct
RAGIIGTIGYYYGMDV

SEQ ID NO: 1049 - protein, 11 aa, Synthetic construct
SGDRLGEKYTS

SEQ ID NO: 1050 - protein, 7 aa, Synthetic construct
QDTKRPS

SEQ ID NO: 1051 - protein, 9 aa, Synthetic construct
QAWESSTVV

SEQ ID NO: 1052 - protein, 125 aa, Synthetic construct
QVQLVESGGGVVQPGGSLRLSCAASGFTFSSYGMHWVRQAPGKCLEWVAFIWYEGSNKYYAESVKDRFTISRDNSKNTLYLQMNSLRAEDTAVYYCARRAGIIGTIGYYYGMDVWGQGTTVTVSS

SEQ ID NO: 1053 - protein, 107 aa, Synthetic construct
SYELTQPPSVSVSPGQTASITCSGDRLGEKYTSWYQQRPGQSPLLVIYQDTKRPSGIPERFSGSNSGNTATLTISGTQAMDEADYYCQAWESSTVVFGCGTKLTVLS

SEQ ID NO: 1054 - protein, 7 aa, Synthetic construct
SNSVIWN

SEQ ID NO: 1055 - protein, 18 aa, Synthetic construct
RTYYRSKWYNDYAVSVKS

SEQ ID NO: 1056 - protein, 9 aa, Synthetic construct
TVYYYGMDV

SEQ ID NO: 1057 - protein, 11 aa, Synthetic construct
SGDKLGNNYAA

SEQ ID NO: 1058 - protein, 7 aa, Synthetic construct
QDSKRPS

SEQ ID NO: 1059 - protein, 9 aa, Synthetic construct
QSWDSSTVV

SEQ ID NO: 1060 - protein, 121 aa, Synthetic construct
QVQLQQSGPGLVKPSQTLSLTCAISGDSVSSNSVIWNWIRQSPSRGLEWLGRTYYRSKWYNDYAVSVKSRITINPDTSKNQFSLQLNSVTPEDTAVYYCAGTVYYYGMDVWGQGATVTVSS

SEQ ID NO: 1061 - protein, 108 aa, Synthetic construct
SYELTQPPSVSVSPGQTGSITCSGDKLGNNYAAWYQQKPGQSPVLVIYQDSKRPSGIPERFSGSNSGNTATLTISGTQAVDEADYYCQSWDSSTVVFGGGTKLTVLGS

SEQ ID NO: 1062 - protein, 7 aa, Synthetic construct
SGANYWT

SEQ ID NO: 1063 - protein, 16 aa, Synthetic construct
YIYYSGSTYLNPSLRG

SEQ ID NO: 1064 - protein, 10 aa, Synthetic construct
ESGSSYGFDY

SEQ ID NO: 1065 - protein, 11 aa, Synthetic construct
RTSQSITSYLN

SEQ ID NO: 1066 - protein, 7 aa, Synthetic construct
ASSSLQS

SEQ ID NO: 1067 - protein, 9 aa, Synthetic construct
QQSYSGPFT

SEQ ID NO: 1068 - protein, 120 aa, Synthetic construct
QVQLQESGPGLVKPSQTLSLTCTVSGGSISSGANYWTWIRQHPGKGLEWIGYIYYSGSTYLNPSLRGRVTMSVDTSKNQFSLKLSSVTAADTAVYYCARESGSSYGFDYWGQGTLVTVSS

SEQ ID NO: 1069 - protein, 109 aa, Synthetic construct
DIQMTQSPSSLSASVGDRVTITCRTSQSITSYLNWYQQKPGQAPKLLIYASSSLQSGVPSRFSGSGSGTDFTLTISSLQPEDFATYYCQQSYSGPFTFGPGTKVDIKRS

SEQ ID NO: 1070 - protein, 4425 aa, Synthetic construct
CAGGTTCAGTTGGTTCAGTCTGGCGCCGAAGTGAAGAAACCAGGCGCTTCTGTGAAGGTGTCCTGCAAGGCCTCTGGCTACACCTTTACCAACTACTGGATGAACTGGGTCCGACAGGCTCCTGGCCAGTGTCTGGAATGGATGGGCAATATCGCTTACGGCGTGAAGGGCACCAACTACAACCAGAAATTCCAGGGCAGAGTGACCATGACCGTGGACACCTCTTCCTCCACCGCCTACATGGAACTGTCCCGGCTGAGATCTGACGACACCGCCGTGTACTACTGCGCCACCAGATACTTCTACGTGATGGACTATTGGGGCCAGGGCACCCTGGTTACAGTTTCTTCTGGCGGCGGAGGACAAGGCGGTGGTGGTCAAGGCGGAGGCGGACAGGATATCCAGATGACCCAGTCTCCTTCCAGCCTGTCTGCCTCTGTGGGCGACAGAGTGACAATCACCTGTCGGGCCTCTCAGGACATCTCCAACTACCTGAACTGGTATCAGCAGAAACCCGGCAAGGTGCCCAAGCTGCTGATCTACTACACCTCCAGACTGCACTCCGGCGTGCCCTCTAGATTTTCTGGCTCTGGATCTGGCACCGACTTCACCCTGACCATCAGTTCTCTGCAGCCTGAGGACGTGGCCACCTACTACTGTGTGCAGTACGCCCAGTTTCCTCTGACCTTCGGCTGTGGCACCAAGGTGGAAATCAAAAGCGGTGGCGGAGGCCAAGAGGTGCAGCTTGTTGAATCTGGCGGAGGATTGGTGCAGCCTGGCGGATCTCTGAAGCTGTCTTGTGCCGCCTCCGGCTTCACCTTCAACAAATACGCCATGAATTGGGTTCGACAAGCCCCAGGCAAAGGCATGGAATGGGTCGCCCGGATCAGATCCAAGTACAACAACTACGCTACCTACTACGCCGACGCCGTGAAGGACAGATTCACCATCTCTCGGGACGACTCCAAGAACACCCTGTACCTGCAGATGAACAACCTGAAAACCGAGGATACCGCCGTCTATTACTGTGTCAGAGCCGGCAACTTCGGCTCCTCCTACATCTCCTACTTTGCCTACTGGGGACAGGGAACCCTCGTGACTGTTTCTAGCGGTGGTGGCGGACAAGGTGGCGGTGGACAAGGCGGCGGAGGCCAACAAACAGTGGTCACACAAGAGCCCAGCCTGACAGTGTCTCCTGGCGGAACAGTGACCATCACATGTGGATCTTCTACCGGCGCTGTGACCTCCGGCAACTACCCCAATTGGATCCAGAAGAAGCCCGGCCAGGCTCCTAGAGGACTGATCGGCGGAACAAAGTTTCTGGCCCCTGGCACACCAGCCAGATTCTCAGGATCTCTGGAAGGCGGCAAGGCCGCTCTGACATTGTCTGGCGTTCAGCCAGAGGATGAGGCCGAGTACTATTGCGTGCTGTACTACTCCAACAGATGGGTGTTCGGCTCCGGCACAAAGCTGACAGTTCTCGGAGGTGGCGGATGCCCTCCTTGTCCTGCTCCTGAATTGCTCGGCGGACCCTCCGTGTTCCTGTTTCCTCCAAAGCCTAAGGACACCCTGATGATCTCTCGGACCCCTGAAGTGACCTGCGTGGTGGTGGATGTGTCCCACGAGGAACCAGAAGTGAAGTTCAATTGGTACGTGGACGGCGTGGAAGTGCACAACGCTAAGACCAAGCCTTGCGAGGAACAGTACGGCAGCACCTACAGATGTGTGTCCGTGCTGACCGTGCTGCACCAGGACTGGCTGAATGGCAAAGAGTACAAGTGCAAGGTGTCCAACAAGGCACTGCCCGCTCCTATCGAAAAGACCATCTCCAAGGCTAAGGGCCAGCCTCGGGAACCTCAGGTTTACACCCTGCCTCCATCTCGGGAAGAGATGACCAAGAACCAGGTGTCCCTGACCTGCCTGGTCAAGGGCTTCTACCCTTCCGATATCGCCGTGGAATGGGAGTCCAATGGCCAGCCTGAGAACAACTACAAGACCACACCTCCTGTGCTGGACTCCGACGGCTCATTCTTCCTGTACTCCAAGCTGACTGTGGACAAGTCTCGGTGGCAGCAGGGCAACGTGTTCTCCTGTTCTGTGATGCACGAGGCCCTGCACAACCACTACACCCAGAAGTCCCTGTCTCTGAGCCCTGGCAAAGGTGGTGGCGGTCAAGGCGGTGGTGGCCAAGGCGGCGGAGGACAAGGTGGCGGAGGCCAAGGTGGTGGCGGACAAGGCGGAGGTGGTCAATGTCCTCCTTGTCCAGCACCAGAACTCCTCGGAGGCCCTTCTGTGTTTCTGTTCCCACCTAAGCCAAAGGATACACTCATGATCAGCAGGACTCCCGAAGTGACATGTGTCGTCGTGGACGTTTCCCATGAAGAACCCGAAGTCAAGTTTAATTGGTATGTCGATGGCGTCGAGGTCCACAATGCCAAGACAAAGCCCTGTGAAGAACAATACGGGTCCACCTATAGATGCGTCAGCGTCCTGACAGTCCTGCATCAGGATTGGCTCAACGGGAAAGAATACAAATGTAAAGTCTCTAACAAGGCTCTCCCAGCACCAATCGAGAAAACCATTAGCAAGGCCAAAGGACAGCCCCGCGAGCCACAAGTGTATACCCTGCCACCTAGCCGCGAGGAAATGACAAAGAATCAAGTCTCTCTGACCTGTCTCGTGAAGGGGTTTTACCCCAGCGACATTGCCGTCGAGTGGGAGTCTAACGGACAACCCGAAAACAATTATAAGACAACCCCACCTGTCCTGGACAGCGACGGCTCATTTTTTCTCTACTCTAAACTCACCGTGGATAAGTCCAGATGGCAACAGGGAAATGTGTTCAGCTGCAGCGTGATGCATGAAGCTCTCCACAATCATTATACCCAGAAAAGCCTGAGCTTGTCTCCCGGCAAAGGTGGCGGAGGACAGGTTCAGTTGCAAGAGTCTGGACCTGGCCTCGTGAAGCCTTCTGAGACACTGAGCCTGACCTGTACCGTGTCTGGCGGCTCCATCTCCTCCAGCTCTTACTTCTGGGGCTGGATCAGACAGCCTCCAGGCAAGTGCCTCGAGTGGATCGGCAACATCTACTACTCCGGCTCCAGCAACTACAATCCTAGCCTGAAGTCCCGCGTGACAATCTCTGTGGATACCTCTAAGAACCAGTTTAGCCTCAAGCTGTCCAGCGTGACCGCCGCTGATACCGCTGTGTATTATTGCGCTAGACTGCCCAGAGGCGACCGGGATGCTTTCGATATTTGGGGACAAGGCACAATGGTCACCGTTTCTAGCGGAGGCGGTGGCCAAGGTGGCGGAGGCCAAGGCGGCGGTGGTCAAGATATTGTGATGACACAGAGCCCCTCTAGCCTGAGCGCTTCCGTGGGAGATCGCGTGACCATTACCTGTAGAGCCAGCCAGGGCATCAGCAATTACCTGGCCTGGTATCAACAAAAGCCTGGGAAAGTCCCTAAGCTCCTCATCTACGCCGCTTCCACACTGCAGAGCGGCGTGCCAAGCAGATTCAGTGGATCCGGCAGCGGAACCGACTTTACTCTGACTATCTCCAGCCTGCAGCCAGAAGATTTCGCTACCTATTACTGCCAGCAGTCCTACAGCACCCCTTTCACCTTTGGCTGCGGAACTAAGGTCGAGATCAAGAGCGGAGGTGGTGGACAAGAGGTCCAGTTGGTCGAGTCAGGTGGCGGCTTGGTCCAACCAGGTGGAAGCCTGAAACTGAGCTGCGCCGCTTCTGGGTTTACTTTTAACAAATATGCTATGAACTGGGTTCGCCAGGCACCTGGAAAAGGCATGGAATGGGTTGCCAGAATCCGCAGCAAGTATAACAATTATGCCACCTATTATGCCGATGCTGTCAAGGATCGGTTCACCATCAGCAGGGACGATAGCAAGAATACCCTCTATCTCCAAATGAACAATCTCAAGACAGAGGACACAGCAGTGTACTATTGTGTTCGCGCTGGCAACTTTGGCAGCAGCTACATCAGCTACTTCGCTTACTGGGGCCAAGGGACACTTGTGACCGTTAGCAGCGGAGGCGGAGGACAAGGTGGCGGAGGACAAGGCGGAGGTGGACAGCAGACAGTTGTGACCCAAGAGCCTTCTCTGACTGTGTCACCAGGCGGCACCGTGACAATTACATGCGGAAGTTCCACAGGCGCCGTGACCAGCGGCAATTATCCTAACTGGATTCAGAAAAAACCTGGACAGGCCCCAAGAGGCCTGATTGGAGGCACCAAATTTCTCGCTCCCGGCACTCCTGCTCGGTTCTCTGGTAGTCTTGAAGGCGGAAAAGCTGCCCTGACTCTCTCTGGCGTGCAACCCGAAGATGAAGCTGAATATTACTGCGTCCTCTACTATAGCAATCGCTGGGTTTTCGGAAGCGGCACCAAGCTCACTGTCCTCTGA

SEQ ID NO: 1071 - protein, 4425 aa, Synthetic construct
CAGGTGCAGCTGGTTCAGTCTGGCGCCGAAGTGAAGAAACCTGGCGCCTCTGTGAAGGTGTCCTGCAAGGCTTCTGGCTACACCTTTACCAACTACTGGATGAACTGGGTCCGACAGGCCCCTGGCCAGTGTTTGGAGTGGATGGGCAATATCGCTTACGGCGTGGCCGGCACCAACTACAACCAGAAATTCCAGGGCAGAGTGACAATGACCGTGGACACCTCCTCCTCCACCGCCTACATGGAACTGTCCCGGCTGAGATCTGACGACACCGCCGTGTACTACTGCGCCACCAGATACTTCTACGTGATGGACTACTGGGGCCAGGGCACCCTGGTTACAGTTTCTTCTGGCGGCGGAGGACAAGGCGGAGGTGGTCAAGGTGGTGGCGGACAGGATATCCAGATGACCCAGTCTCCTTCCAGCCTGTCTGCCTCTGTGGGCGACAGAGTGACCATCACCTGTAGAGCCAGCCAGGACATCTCCAACTACCTGAACTGGTATCAGCAGAAACCCGGCAAGGTGCCCAAGCTGCTGATCTACTACACCTCTCGGCTGCACTCTGGCGTGCCCTCTAGATTTTCTGGCTCCGGCTCTGGCACCGACTTTACCCTGACAATCTCCAGCCTGCAGCCTGAGGATGTGGCCACCTACTACTGTGTGCAGTACGCCCAGTTTCCTCTGACCTTCGGCTGTGGCACCAAGGTGGAAATCAAGTCTGGAGGCGGAGGCCAAGAGGTGCAGCTGGTGGAGTCCGGCGGCGGCCTGGTGCAGCCCGGCGGCTCCCTGAAGCTGTCCTGCGCCGCCTCCGGCTTCACCTTCAACAAGTACGCCATGAACTGGGTGAGGCAGGCCCCCGGCAAGGGCATGGAGTGGGTGGCCAGGATCAGGTCCAAGTACAACAACTACGCCACCTACTACGCCGACGCCGTGAAGGACAGGTTCACCATCTCCAGGGACGACTCCAAGAACACCCTGTACCTGCAGATGAACAACCTGAAGACCGAGGACACCGCCGTGTACTACTGCGTGAGGGCCGGCAACTTCGGCTCCTCCTACATCTCCTACTTCGCCTACTGGGGCCAGGGCACCCTGGTGACCGTGTCCTCCGGCGGCGGCGGCCAAGGCGGCGGCGGCCAAGGCGGCGGCGGCCAACAGACCGTGGTGACCCAGGAGCCCTCCCTGACCGTGTCCCCCGGCGGCACCGTGACCATCACCTGCGGCTCCTCCACCGGCGCCGTGACCTCCGGCAACTACCCCAACTGGATCCAGAAGAAGCCCGGCCAGGCCCCCAGGGGCCTGATCGGCGGCACCAAGTTCCTGGCCCCCGGCACCCCCGCCAGGTTCTCCGGCTCCCTGGAGGGCGGCAAGGCCGCCCTGACCCTGTCCGGCGTGCAGCCCGAGGACGAGGCCGAGTACTACTGCGTGCTGTACTACTCCAACAGGTGGGTGTTCGGCTCCGGCACCAAGCTGACCGTCCTAGGCGGAGGCGGCTGCCCTCCTTGTCCTGCTCCTGAATTGCTCGGCGGACCCTCCGTGTTCCTGTTTCCTCCAAAGCCTAAGGACACCCTGATGATCTCTCGTACGCCTGAAGTGACCTGCGTGGTGGTGGATGTGTCCCACGAGGAACCCGAAGTGAAGTTCAATTGGTACGTGGACGGCGTGGAAGTGCACAACGCCAAGACAAAGCCCTGCGAGGAACAGTACGGCTCCACCTACAGATGCGTGTCCGTGCTGACAGTGCTGCACCAGGATTGGCTGAACGGCAAAGAGTACAAGTGCAAGGTGTCCAACAAGGCCCTGCCTGCTCCTATCGAAAAGACCATCTCCAAGGCCAAGGGCCAGCCTAGAGAGCCCCAGGTTTACACCCTGCCTCCAAGCAGAGAAGAGATGACCAAGAACCAGGTGTCCCTGACCTGCCTGGTCAAGGGCTTCTACCCTTCCGATATCGCCGTGGAATGGGAGAGCAATGGACAGCCCGAGAACAACTACAAGACCACACCTCCTGTGCTGGACTCCGACGGCTCATTCTTCCTGTACTCCAAGCTGACCGTGGACAAGTCCAGATGGCAGCAGGGCAACGTGTTCTCCTGCTCCGTGATGCACGAGGCCCTGCACAATCACTACACCCAGAAGTCCCTGTCTCTGTCCCCTGGAAAAGGAGGCGGAGGACAAGGCGGAGGTGGTCAAGGTGGTGGTGGCCAAGGCGGAGGCGGACAAGGCGGCGGAGGACAAGGTGGCGGTGGACAGTGTCCTCCATGTCCAGCACCTGAGCTTCTCGGAGGCCCTTCTGTGTTTCTGTTCCCACCTAAGCCAAAGGATACACTCATGATCAGCCGCACACCTGAAGTCACATGTGTCGTCGTGGATGTCTCTCATGAAGAACCAGAAGTCAAGTTTAATTGGTATGTCGATGGCGTCGAGGTCCACAATGCTAAGACCAAGCCTTGTGAAGAACAATATGGCAGCACCTATCGCTGTGTGTCTGTCCTGACCGTCCTGCATCAAGACTGGCTCAATGGGAAAGAATACAAATGCAAAGTCTCTAACAAAGCTCTGCCCGCACCAATCGAGAAAACCATCAGCAAGGCTAAAGGACAGCCTCGCGAGCCTCAAGTGTATACCCTGCCACCTTCTCGCGAGGAAATGACAAAAAATCAAGTCTCCCTCACCTGTCTCGTGAAGGGATTCTATCCCAGCGACATTGCCGTCGAGTGGGAGTCTAATGGCCAGCCTGAAAACAATTATAAGACAACCCCACCTGTCCTGGACAGCGACGGCTCATTTTTTCTCTACTCTAAACTCACCGTGGATAAGAGCCGGTGGCAACAGGGAAATGTGTTCAGCTGTAGCGTGATGCATGAAGCTCTCCACAACCATTATACACAGAAGAGTCTGAGCCTGTCTCCTGGCAAAGGCGGCGGAGGACAGGTGCAACTCCAGGAATCCGGGCCAGGGTTGGTGAAACCCAGCGAGACACTGTCTCTGACTTGCACTGTTTCTGGTGGCTCCATTTCCTCTAGCTCTTACTTCTGGGGTTGGATACGGCAACCACCTGGGAAGTGTCTCGAATGGATTGGTAACATCTACTATAGTGGATCCTCCAACTACAATCCCAGCCTGAAGAGTCGTGTGACTATCAGCGTTGACACCTCAAAGAATCAGTTCTCCCTTAAGCTGAGTTCCGTGACAGCAGCAGATACAGCCGTCTACTACTGTGCTCGACTTCCTAGGGGAGATCGGGATGCCTTCGACATTTGGGGTCAGGGTACGATGGTAACAGTGTCTAGTGGAGGCGGAGGTCAAGGCGGCGGAGGCCAAGGAGGAGGCGGACAAGATATCGTGATGACCCAGAGCCCATCAAGCCTGAGTGCTAGCGTTGGGGACAGGGTCACTATCACTTGCAGAGCCTCACAGGGGATTTCCAACTATCTGGCCTGGTATCAGCAGAAACCTGGCAAGGTCCCCAAACTCCTGATATATGCTGCAAGCACGCTGCAAAGCGGGGTACCCTCTCGCTTTTCTGGGTCTGGCTCTGGCACAGACTTTACCCTGACCATCTCCAGTTTGCAGCCTGAGGACTTTGCCACCTACTATTGCCAGCAGTCCTACTCAACACCCTTCACCTTTGGCTGTGGCACCAAGGTGGAGATCAAATCCGGAGGCGGAGGACAAGAAGTCCAGCTGGTTGAAAGTGGTGGCGGATTGGTTCAGCCAGGCGGCTCTCTGAAGCTGTCTTGTGCTGCCTCCGGCTTCACCTTCAACAAATACGCCATGAATTGGGTTCGACAAGCCCCAGGCAAAGGCATGGAATGGGTCGCCCGGATCAGATCCAAGTACAACAACTACGCTACCTACTACGCCGACGCCGTGAAGGACCGGTTCACCATCTCCAGAGATGACTCCAAGAACACCCTGTACCTGCAGATGAACAACCTCAAGACCGAGGATACCGCCGTCTATTACTGTGTCAGAGCCGGCAACTTCGGCTCCTCCTACATCTCCTACTTCGCCTACTGGGGCCAGGGAACCCTTGTGACAGTCTCTAGTGGCGGTGGTGGTCAAGGTGGTGGCGGCCAAGGCGGTGGCGGACAACAAACAGTGGTCACCCAAGAGCCTAGCCTGACCGTTTCTCCTGGCGGCACCGTGACCATCACATGCGGATCTTCTACCGGCGCTGTGACCTCCGGCAACTACCCCAATTGGATCCAGAAGAAGCCAGGCCAGGCTCCTAGAGGACTGATCGGCGGCACAAAGTTTCTGGCTCCCGGCACTCCCGCCAGATTTTCTGGATCTCTGGAAGGCGGCAAGGCTGCTCTGACATTGTCTGGCGTCCAGCCAGAGGATGAGGCCGAGTACTATTGCGTGCTGTACTACTCCAACAGATGGGTGTTCGGCTCCGGCACCAAGCTGACAGTCCTATGA

SEQ ID NO: 1072 - protein, 4551 aa, Synthetic construct
CAGGTGCAGCTGGTGGAATCTGGTGGCGGAGTTGTGCAGCCTGGCAGATCCCTGAGACTGTCTTGTGCCGCCTCCGGCTTCACCTTCTCCTCTTATGGAATGGGCTGGGTCCGACAGGCCCCTGGCAAATGTTTGGAATGGGTCGCCGTGATCTCCTACGAGGCCTCCAACAAGTACTACGCCGAGGCCGTGAAGGGCAGATTCACCATCTCCAGAGACAACTCCAAGAACACCCTGTACCTGCAGATGAACTCCCTGAGAGCCGAGGACACCGCCGTGTACTACTGTGCTAGAGAGGGCGCCCATTTCGGCTCCGGCTCTTACTACCCTCTGTACTACTACTACGCTATGGACGTGTGGGGCCAGGGCACCACAGTGACAGTTTCTAGCGGAGGCGGAGGAAGTGGCGGCGGAGGATCTGGCGGTGGTGGTTCTGAAATCGTGCTGACCCAGTCTCCTGGCACACTGTCTTTGAGCCCTGGCGAGAGAGCTACCCTGAGCTGTAGAGCCTCTCAGTCCGTGTCCTCCTCTTACCTGGCCTGGTATCAGCAGAAGCCCGGCCAGGCTCCTAGACTGTTGATCTACGGCGCCTCCATCAGAGCCACAGGCATCCCTGATAGATTCTCCGGCAGCGGCTCTGGCACCGACTTCACCCTGACAATCTCTCGGCTGGAACCCGAGGACTTTGCTGTGTACTATTGCCAGCAGTACGGCAGCTCCCCTATCTTCACCTTTGGCTGCGGCACCAAGGTGGAAATCAAGTCCGGGGGCGGAGGCTCCGAGGTGCAGCTGGTGGAGTCCGGCGGCGGCCTGGTGCAGCCCGGCGGCTCCCTGAAGCTGTCCTGCGCCGCCTCCGGCTTCACCTTCAACAAGTACGCCATGAACTGGGTGAGGCAGGCCCCCGGCAAGGGCATGGAGTGGGTGGCCAGGATCAGGTCCAAGTACAACAACTACGCCACCTACTACGCCGACGCCGTGAAGGACAGGTTCACCATCTCCAGGGACGACTCCAAGAACACCCTGTACCTGCAGATGAACAACCTGAAGACCGAGGACACCGCCGTGTACTACTGCGTGAGGGCCGGCAACTTCGGCTCCTCCTACATCTCCTACTTCGCCTACTGGGGCCAGGGCACCCTGGTGACCGTGTCCTCCGGCGGCGGCGGCTCCGGCGGCGGCGGCTCCGGCGGCGGCGGCTCCCAGACCGTGGTGACCCAGGAGCCCTCCCTGACCGTGTCCCCCGGCGGCACCGTGACCATCACCTGCGGCTCCTCCACCGGCGCCGTGACCTCCGGCAACTACCCCAACTGGATCCAGAAGAAGCCCGGCCAGGCCCCCAGGGGCCTGATCGGCGGCACCAAGTTCCTGGCCCCCGGCACCCCCGCCAGGTTCTCCGGCTCCCTGGAGGGCGGCAAGGCCGCCCTGACCCTGTCCGGCGTGCAGCCCGAGGACGAGGCCGAGTACTACTGCGTGCTGTACTACTCCAACAGGTGGGTGTTCGGCTCCGGCACCAAGCTGACCGTGCTAGGCGGCGGAGGATCTGGCGGAGGTGGAAGCGGAGGCGGTGGATCTGACAAGACCCACACATGTCCTCCATGTCCCGCCCCTGAACTGCTAGGCGGACCTAGCGTGTTCCTGTTCCCCCCAAAGCCCAAGGACACCCTGATGATCAGCCGTACGCCCGAAGTGACCTGCGTGGTGGTGGATGTGTCCCACGAGGACCCTGAAGTGAAGTTCAATTGGTACGTGGACGGCGTGGAAGTGCACAACGCCAAGACCAAGCCCTGCGAGGAACAGTACGGCAGCACCTACAGATGCGTGTCCGTGCTGACCGTGCTGCATCAGGACTGGCTGAACGGCAAAGAGTACAAGTGCAAGGTGTCCAACAAGGCCCTGCCTGCCCCCATCGAGAAAACCATCAGCAAGGCCAAGGGCCAGCCCCGCGAGCCTCAAGTGTATACCCTGCCCCCTAGCCGGGAAGAGATGACCAAGAACCAGGTGTCCCTGACCTGTCTCGTGAAGGGCTTCTACCCCTCCGATATCGCCGTGGAATGGGAGAGCAACGGCCAGCCCGAGAACAACTACAAGACCACCCCCCCTGTGCTGGACAGCGACGGCTCATTCTTCCTGTACTCCAAACTGACCGTGGACAAGAGCCGGTGGCAGCAGGGCAACGTGTTCAGCTGCAGCGTGATGCACGAGGCCCTGCACAACCACTACACCCAGAAGTCCCTGTCCCTGTCTCCCGGGAAAGGCGGCGGAGGATCTGGCGGAGGCGGATCTGGGGGCGGAGGAAGTGGGGGAGGGGGAAGCGGAGGGGGAGGCTCAGGGGGGGGAGGATCCGATAAGACCCACACCTGTCCCCCTTGCCCTGCCCCTGAACTGCTGGGAGGCCCTAGCGTGTTCCTGTTCCCCCCAAAGCCCAAGGACACCCTGATGATCAGCCGGACCCCCGAAGTGACCTGCGTGGTGGTGGATGTGTCCCACGAGGACCCTGAAGTGAAGTTCAATTGGTACGTGGACGGCGTGGAAGTGCACAACGCCAAGACCAAGCCCTGCGAGGAACAGTACGGCAGCACCTACAGATGCGTGTCCGTGCTGACCGTGCTGCACCAGGACTGGCTGAACGGCAAAGAGTACAAGTGCAAGGTGTCCAACAAGGCCCTGCCTGCCCCCATCGAGAAAACCATCAGCAAGGCCAAGGGCCAGCCCCGCGAGCCTCAAGTGTATACCCTGCCCCCCAGCCGGGAAGAGATGACCAAGAACCAGGTGTCCCTGACCTGTCTCGTGAAGGGCTTCTACCCCTCCGATATCGCCGTGGAATGGGAGAGCAACGGCCAGCCCGAGAACAACTACAAGACCACCCCCCCTGTGCTGGACAGCGACGGCTCATTCTTCCTGTACTCCAAGCTGACAGTGGACAAGTCTAGATGGCAGCAGGGCAACGTGTTCAGCTGCAGCGTGATGCACGAGGCCCTGCACAACCACTACACCCAGAAGTCCCTGTCCCTGAGCCCCGGCAAAGGTGGAGGCGGATCTGGCGGTGGCGGGAGTGGAGGAGGAGGCAGCCAGGTGCAGCTGATGGAATCTGGTGGCGGAGTTGTGCAGCCTGGCAGATCCCTGAGACTGTCTTGTGCCGCCTCCGGCTTCACCTTCAGCCGGTACTATATGCACTGGGTCCGACAGGCCCCTGGCAAGTGTCCTGAATGGGTTGCCGTGATCTGGCACGACGGCTCCAACAAGTACTACGCCGACTCCGTGAAGGGCAGATTCACCATCTCTCGGGACAACTCCAAGAACACCCTGTACCTGCAGATGAACTCCCTGAGAGCCGAGGACACCGCCGTGTACTACTGTGCTAGAGAGGCCCCTTCTCTGGCCTATTGGGGACAGGGAACACTGGTCACAGTGTCCTCTGGCGGCGGAGGATCTGGCGGAGGTGGTAGCGGAGGCGGTGGATCTGAGATCGTGATGACCCAGTCTCCTGGCACACTGTCTCTGAGCCCTGGCGAGAGAGCTACCCTGTCTTGTAGAGCCTCTCAGTCCGTGTCCTCCTCCTACCTGGCTTGGTATCAGCAGAAGCCAGGCCAGGCTCCTCGGCTGTTGATCTACGGCGCTTCCTCTAGAGCCACAGGCATCCCTGACAGATTCTCCGGCTCTGGCTCTGGCACCGACTTCACCCTGACCATCTCCAGACTGGAACCCGAGGACTTTGCTGTGTACTATTGCCAGCAGTACGGCTCCTCCATCACCTTCGGCTGTGGCACCAGGCTGGAAATCAAGTCTGGAGGCGGAGGATCTGAAGTCCAGCTGGTTGAAAGTGGTGGCGGATTGGTTCAGCCAGGCGGCTCTCTGAAGCTGTCTTGTGCTGCCTCCGGCTTCACCTTCAACAAATACGCCATGAATTGGGTTCGACAAGCCCCAGGCAAAGGCATGGAATGGGTCGCCCGGATCAGATCCAAGTACAACAACTACGCTACCTACTACGCCGACGCCGTGAAGGACCGGTTCACCATCTCCAGAGATGACTCCAAGAACACCCTGTACCTGCAGATGAACAACCTCAAGACCGAGGATACCGCCGTCTATTACTGTGTCAGAGCCGGCAACTTCGGCTCCTCCTACATCTCCTACTTCGCCTACTGGGGCCAGGGAACCCTTGTGACAGTCTCTAGTGGCGGTGGTGGTAGTGGTGGTGGCGGCTCAGGCGGTGGCGGATCTCAAACAGTGGTCACCCAAGAGCCTAGCCTGACCGTTTCTCCTGGCGGCACCGTGACCATCACATGCGGATCTTCTACCGGCGCTGTGACCTCCGGCAACTACCCCAATTGGATCCAGAAGAAGCCAGGCCAGGCTCCTAGAGGACTGATCGGCGGCACAAAGTTTCTGGCTCCCGGCACTCCCGCCAGATTTTCTGGATCTCTGGAAGGCGGCAAGGCTGCTCTGACATTGTCTGGCGTCCAGCCAGAGGATGAGGCCGAGTACTATTGCGTGCTGTACTACTCCAACAGATGGGTGTTCGGCTCCGGCACCAAGCTGACAGTCCTATGA

SEQ ID NO: 1073 - protein, 1516 aa, Synthetic construct
QVQLVESGGGVVQPGRSLRLSCAASGFTFSSYGMGWVRQAPGKCLEWVAVISYEASNKYYAEAVKGRFTISRDNSKNTLYLQMNSLRAEDTAVYYCAREGAHFGSGSYYPLYYYYAMDVWGQGTTVTVSSGGGGSGGGGSGGGGSEIVLTQSPGTLSLSPGERATLSCRASQSVSSSYLAWYQQKPGQAPRLLIYGASIRATGIPDRFSGSGSGTDFTLTISRLEPEDFAVYYCQQYGSSPIFTFGCGTKVEIKSGGGGSEVQLVESGGGLVQPGGSLKLSCAASGFTFNKYAMNWVRQAPGKGMEWVARIRSKYNNYATYYADAVKDRFTISRDDSKNTLYLQMNNLKTEDTAVYYCVRAGNFGSSYISYFAYWGQGTLVTVSSGGGGSGGGGSGGGGSQTVVTQEPSLTVSPGGTVTITCGSSTGAVTSGNYPNWIQKKPGQAPRGLIGGTKFLAPGTPARFSGSLEGGKAALTLSGVQPEDEAEYYCVLYYSNRWVFGSGTKLTVLGGGGSGGGGSGGGGSDKTHTCPPCPAPELLGGPSVFLFPPKPKDTLMISRTPEVTCVVVDVSHEDPEVKFNWYVDGVEVHNAKTKPCEEQYGSTYRCVSVLTVLHQDWLNGKEYKCKVSNKALPAPIEKTISKAKGQPREPQVYTLPPSREEMTKNQVSLTCLVKGFYPSDIAVEWESNGQPENNYKTTPPVLDSDGSFFLYSKLTVDKSRWQQGNVFSCSVMHEALHNHYTQKSLSLSPGKGGGGSGGGGSGGGGSGGGGSGGGGSGGGGSDKTHTCPPCPAPELLGGPSVFLFPPKPKDTLMISRTPEVTCVVVDVSHEDPEVKFNWYVDGVEVHNAKTKPCEEQYGSTYRCVSVLTVLHQDWLNGKEYKCKVSNKALPAPIEKTISKAKGQPREPQVYTLPPSREEMTKNQVSLTCLVKGFYPSDIAVEWESNGQPENNYKTTPPVLDSDGSFFLYSKLTVDKSRWQQGNVFSCSVMHEALHNHYTQKSLSLSPGKGGGGSGGGGSGGGGSQVQLMESGGGVVQPGRSLRLSCAASGFTFSRYYMHWVRQAPGKCPEWVAVIWHDGSNKYYADSVKGRFTISRDNSKNTLYLQMNSLRAEDTAVYYCAREAPSLAYWGQGTLVTVSSGGGGSGGGGSGGGGSEIVMTQSPGTLSLSPGERATLSCRASQSVSSSYLAWYQQKPGQAPRLLIYGASSRATGIPDRFSGSGSGTDFTLTISRLEPEDFAVYYCQQYGSSITFGCGTRLEIKSGGGGSEVQLVESGGGLVQPGGSLKLSCAASGFTFNKYAMNWVRQAPGKGMEWVARIRSKYNNYATYYADAVKDRFTISRDDSKNTLYLQMNNLKTEDTAVYYCVRAGNFGSSYISYFAYWGQGTLVTVSSGGGGSGGGGSGGGGSQTVVTQEPSLTVSPGGTVTITCGSSTGAVTSGNYPNWIQKKPGQAPRGLIGGTKFLAPGTPARFSGSLEGGKAALTLSGVQPEDEAEYYCVLYYSNRWVFGSGTKLTVL

SEQ ID NO: 1074 - protein, 4536 aa, Synthetic construct
CAGGTGCAGCTGGTTCAGTCTGGCGCCGAAGTGAAGAAACCTGGCGCCTCTGTGAAGGTGTCCTGCAAGGCTTCTGGCTACACCTTTACCGACTACTACATGCACTGGGTCCGACAGGCCCCTGGCCAGTGTTTGGAATGGATGGGCTGGATCAACCCCAACTCTGGCGGCCCTAATTACGCCCAGAAATTCCAGGGCAGAGTGACCATGACCAGAGACACCTCCATCTCCACCGCTCACATGGAACTGTCCCGGCTGAGATCTGACGACACCGCCGTGTACTACTGCGCCAGAGAAAAGCACGCTGTGGCCGGCATCGGCTTCGATTATTGGGGACAGGGCACCCTGGTCACCGTTTCTAGCGGAGGCGGAGGATCTGGTGGTGGTGGATCTGGCGGCGGAGGCTCTGATATCCAGATGACCCAGTCTCCTTCCTCCGTGTCTGCCTCTGTGGGCGACAGAGTGACAATCACCTGTCAGGCCAGCCAGGACATCTCCAACTACCTGAACTGGTATCAGCAGAAGCCCGGCAAGGCCCCTAAGCTGCTGATCTACGCTGCCTCCTCTCTGGAATCTGGCGTGCCCTCCAGATTCTCCGGCTCTGGCTCTGGCACAGACTTTACCCTGACAATCTCCAGCCTGCAGCCTGAGGACTTCGCCACCTACTACTGTCAGCAGGCCAACAGCTTCCCTCTGACCTTTGGCTGTGGCACCAAGGTGGACATCAAGTCTGGTGGCGGCGGTTCCGAAGTCCAGCTGGTTGAAAGTGGTGGCGGATTGGTTCAGCCAGGCGGCTCTCTGAAGCTGTCTTGTGCTGCCTCCGGCTTCACCTTCAACAAATACGCCATGAATTGGGTTCGACAAGCCCCAGGCAAAGGCATGGAATGGGTCGCCCGGATCAGATCCAAGTACAACAACTACGCTACCTACTACGCCGACGCCGTGAAGGACCGGTTCACCATCTCCAGAGATGACTCCAAGAACACCCTGTACCTGCAGATGAACAACCTCAAGACCGAGGATACCGCCGTCTATTACTGTGTCAGAGCCGGCAACTTCGGCTCCTCCTACATCTCCTACTTCGCCTACTGGGGCCAGGGAACCCTTGTGACAGTCTCTAGTGGCGGTGGTGGTAGTGGTGGTGGCGGCTCAGGCGGTGGCGGATCTCAAACAGTGGTCACCCAAGAGCCTAGCCTGACCGTTTCTCCTGGCGGCACCGTGACCATCACATGCGGATCTTCTACCGGCGCTGTGACCTCCGGCAACTACCCCAATTGGATCCAGAAGAAGCCAGGCCAGGCTCCTAGAGGACTGATCGGCGGCACAAAGTTTCTGGCTCCCGGCACTCCCGCCAGATTTTCTGGATCTCTGGAAGGCGGCAAGGCTGCTCTGACATTGTCTGGCGTCCAGCCAGAGGATGAGGCCGAGTACTATTGCGTGCTGTACTACTCCAACAGATGGGTGTTCGGCTCCGGCACCAAGCTGACAGTCCTAGGCGGCGGAGGATCTGGCGGAGGTGGAAGCGGAGGCGGTGGATCTGACAAGACCCACACATGTCCTCCATGTCCCGCCCCTGAACTGCTAGGCGGACCTAGCGTGTTCCTGTTCCCCCCAAAGCCCAAGGACACCCTGATGATCAGCCGTACGCCCGAAGTGACCTGCGTGGTGGTGGATGTGTCCCACGAGGACCCTGAAGTGAAGTTCAATTGGTACGTGGACGGCGTGGAAGTGCACAACGCCAAGACCAAGCCCTGCGAGGAACAGTACGGCAGCACCTACAGATGCGTGTCCGTGCTGACCGTGCTGCATCAGGACTGGCTGAACGGCAAAGAGTACAAGTGCAAGGTGTCCAACAAGGCCCTGCCTGCCCCCATCGAGAAAACCATCAGCAAGGCCAAGGGCCAGCCCCGCGAGCCTCAAGTGTATACCCTGCCCCCTAGCCGGGAAGAGATGACCAAGAACCAGGTGTCCCTGACCTGTCTCGTGAAGGGCTTCTACCCCTCCGATATCGCCGTGGAATGGGAGAGCAACGGCCAGCCCGAGAACAACTACAAGACCACCCCCCCTGTGCTGGACAGCGACGGCTCATTCTTCCTGTACTCCAAACTGACCGTGGACAAGAGCCGGTGGCAGCAGGGCAACGTGTTCAGCTGCAGCGTGATGCACGAGGCCCTGCACAACCACTACACCCAGAAGTCCCTGTCCCTGTCTCCCGGGAAAGGCGGCGGAGGATCTGGCGGAGGCGGATCTGGGGGCGGAGGAAGTGGGGGAGGGGGAAGCGGAGGGGGAGGCTCAGGGGGGGGAGGATCCGATAAGACCCACACCTGTCCCCCTTGCCCTGCCCCTGAACTGCTGGGAGGCCCTAGCGTGTTCCTGTTCCCCCCAAAGCCCAAGGACACCCTGATGATCAGCCGGACCCCCGAAGTGACCTGCGTGGTGGTGGATGTGTCCCACGAGGACCCTGAAGTGAAGTTCAATTGGTACGTGGACGGCGTGGAAGTGCACAACGCCAAGACCAAGCCCTGCGAGGAACAGTACGGCAGCACCTACAGATGCGTGTCCGTGCTGACCGTGCTGCACCAGGACTGGCTGAACGGCAAAGAGTACAAGTGCAAGGTGTCCAACAAGGCCCTGCCTGCCCCCATCGAGAAAACCATCAGCAAGGCCAAGGGCCAGCCCCGCGAGCCTCAAGTGTATACCCTGCCCCCCAGCCGGGAAGAGATGACCAAGAACCAGGTGTCCCTGACCTGTCTCGTGAAGGGCTTCTACCCCTCCGATATCGCCGTGGAATGGGAGAGCAACGGCCAGCCCGAGAACAACTACAAGACCACCCCCCCTGTGCTGGACAGCGACGGCTCATTCTTCCTGTACTCCAAGCTGACAGTGGACAAGTCTAGATGGCAGCAGGGCAACGTGTTCAGCTGCAGCGTGATGCACGAGGCCCTGCACAACCACTACACCCAGAAGTCCCTGTCCCTGAGCCCCGGCAAAGGTGGAGGCGGATCTGGCGGTGGCGGGAGTGGAGGAGGAGGCAGCCAGGTGACTCTGAAAGAATCCGGTCCCACTCTCGTCAAGCCTACCGAAACTCTGACCCTGACGTGTACTGTCAGTGGGTTTTCCTTCAGGAATGCACGAATGGGTGTAAGCTGGATACGCCAACCACCTGGCAAATGCCTGGAATGGCTCGCTCACATCTTCAGCAATGACGAGAAGTCCTATTCTACCTCCCTGAAATCCCGGTTGACCATTTCCAAGGATACGAGCAAGTCTCAGGTTGTGCTGACCATGACCAACATGGATCCCGTGGATACAGCCACCTACTTCTGTGCTCGTGTTCCCGAGTATAGCTCTGGCTGGTATCGGTTTGACTACTGGGGACAGGGCACATTGGTGACAGTATCTTCAGGAGGCGGCGGGTCAGGTGGCGGAGGATCAGGCGGTGGTGGTTCTGACATTCAGATGACTCAGAGCCCATCAAGTCTGAGTGCCAGTGTTGGAGATAGAGTGACCATCAGTTGCAGAGCCTCTCAGTCTATCAGGAGCTACCTTAACTGGTATCAGCAGAAACCCGGCAAAGCTCCTAAGCTGCTGATCTACGCAACTAGCAGCCTTCAAGGAGGGGTGCCATCCCGCTTTAGTGGGTCAGGATCTGGCACTGACTTTACCCTCACAATCAGCTCCTTGCAACCTGAGGACTTTGCCACCTACTACTGCCAGCAGTCCTATTCCACACCCTTCACATTCGGGTGTGGGACAAAGGTCGAGATTAAGTCCGGAGGCGGAGGATCTGAAGTGCAGCTGGTTGAATCTGGCGGCGGATTGGTTCAGCCTGGCGGATCTCTGAAGCTGTCTTGTGCCGCCTCTGGCTTCACCTTCAACAAATACGCCATGAACTGGGTCCGACAGGCCCCTGGCAAAGGCATGGAATGGGTCGCCCGGATCAGATCCAAGTACAACAACTACGCTACCTACTACGCCGACGCCGTGAAGGACCGGTTCACCATCTCCAGAGATGACTCCAAGAACACCCTGTACCTGCAGATGAACAACCTCAAGACCGAGGACACCGCCGTGTACTACTGTGTCAGAGCCGGCAACTTCGGCTCCTCCTACATCTCCTACTTCGCCTATTGGGGCCAGGGCACCCTGGTCACAGTTAGTTCAGGTGGCGGTGGATCAGGCGGCGGAGGTTCTGGTGGCGGAGGCTCTCAAACAGTGGTCACCCAAGAGCCTAGCCTGACCGTTTCTCCTGGCGGCACCGTGACCATCACCTGTGGATCTTCTACCGGCGCTGTGACCTCCGGCAACTACCCCAATTGGATCCAGAAGAAGCCCGGCCAGGCTCCTAGAGGACTGATCGGAGGCACCAAGTTTCTGGCTCCCGGCACTCCTGCCAGATTCTCCGGTTCTCTGGAAGGCGGAAAGGCCGCTCTGACATTGTCTGGCGTGCAGCCTGAGGATGAGGCTGAGTACTACTGCGTGCTGTACTACTCCAACAGATGGGTGTTCGGCTCCGGCACCAAGCTGACAGTGCTT

SEQ ID NO: 1075 - protein, 1506 aa, Synthetic construct
QVQLQESGPGLVKPSETLSLTCTVSGGSISSSSYFWGWIRQPPGKCLEWIGNIYYSGSSNYNPSLKSRVTISVDTSKNQFSLKLSSVTAADTAVYYCARLPRGDRDAFDIWGQGTMVTVSSGGGGSGGGGSGGGGSDIVMTQSPSSLSASVGDRVTITCRASQGISNYLAWYQQKPGKVPKLLIYAASTLQSGVPSRFSGSGSGTDFTLTISSLQPEDFATYYCQQSYSTPFTFGCGTKVEIKSGGGGSEVQLVESGGGLVQPGGSLKLSCAASGFTFNKYAMNWVRQAPGKGMEWVARIRSKYNNYATYYADAVKDRFTISRDDSKNTLYLQMNNLKTEDTAVYYCVRAGNFGTSYISYWAYWGQGTLVTVSSGGGGSGGGGSGGGGSQTVVTQEPSLTVSPGGTVTITCGSSTGAVTSGNYPNWVQKKPGQAPRGLIGGTKFLAPGTPARFSGSLSGGKAALTLSGVQPEDEAEYYCVLWYSNRWVFGSGTKLTVLGGGGSGGGGSGGGGSDKTHTCPPCPAPELLGGPSVFLFPPKPKDTLMISRTPEVTCVVVDVSHEDPEVKFNWYVDGVEVHNAKTKPCEEQYGSTYRCVSVLTVLHQDWLNGKEYKCKVSNKALPAPIEKTISKAKGQPREPQVYTLPPSREEMTKNQVSLTCLVKGFYPSDIAVEWESNGQPENNYKTTPPVLDSDGSFFLYSKLTVDKSRWQQGNVFSCSVMHEALHNHYTQKSLSLSPGKGGGGSGGGGSGGGGSGGGGSGGGGSGGGGSDKTHTCPPCPAPELLGGPSVFLFPPKPKDTLMISRTPEVTCVVVDVSHEDPEVKFNWYVDGVEVHNAKTKPCEEQYGSTYRCVSVLTVLHQDWLNGKEYKCKVSNKALPAPIEKTISKAKGQPREPQVYTLPPSREEMTKNQVSLTCLVKGFYPSDIAVEWESNGQPENNYKTTPPVLDSDGSFFLYSKLTVDKSRWQQGNVFSCSVMHEALHNHYTQKSLSLSPGKGGGGSGGGGSGGGGSQVQLVQSGAEVKKPGASVKVSCKASGYTFTNYWMNWVRQAPGQCLEWMGNIAYGVKGTNYNQKFQGRVTMTVDTSSSTAYMELSRLRSDDTAVYYCATRYFYVMDYWGQGTLVTVSSGGGGSGGGGSGGGGSDIQMTQSPSSLSASVGDRVTITCRASQDISNYLNWYQQKPGKVPKLLIYYTSRLHSGVPSRFSGSGSGTDFTLTISSLQPEDVATYYCVQYAQFPLTFGCGTKVEIKSGGGGSEVQLVESGGGLVQPGGSLKLSCAASGFTFNKYAMNWVRQAPGKGMEWVARIRSKYNNYATYYADAVKDRFTISRDDSKNTLYLQMNNLKTEDTAVYYCVRAGNFGTSYISYWAYWGQGTLVTVSSGGGGSGGGGSGGGGSQTVVTQEPSLTVSPGGTVTITCGSSTGAVTSGNYPNWVQKKPGQAPRGLIGGTKFLAPGTPARFSGSLSGGKAALTLSGVQPEDEAEYYCVLWYSNRWVFGSGTKLTVL

SEQ ID NO: 1076 - protein, 1506 aa, Synthetic construct
QVQLQESGPGLVKPSETLSLTCTVSGGSISSSSYFWGWIRQPPGKCLEWIGNIYYSGSSNYNPSLKSRVTISVDTSKNQFSLKLSSVTAADTAVYYCARLPRGDRDAFDIWGQGTMVTVSSGGGGSGGGGSGGGGSDIVMTQSPSSLSASVGDRVTITCRASQGISNYLAWYQQKPGKVPKLLIYAASTLQSGVPSRFSGSGSGTDFTLTISSLQPEDFATYYCQQSYSTPFTFGCGTKVEIKSGGGGSEVQLVESGGGLVQPGGSLKLSCAASGFTFNKYAMNWVRQAPGKGMEWVARIRSKYNNYATYYADAVKDRFTISRDDSKNTLYLQMNNLKTEDTAVYYCVRAGNFGSSYISYFAYWGQGTLVTVSSGGGGSGGGGSGGGGSQTVVTQEPSLTVSPGGTVTITCGSSTGAVTSGNYPNWIQKKPGQAPRGLIGGTKFLAPGTPARFSGSLEGGKAALTLSGVQPEDEAEYYCVLYYSNRWVFGSGTKLTVLGGGGSGGGGSGGGGSDKTHTCPPCPAPELLGGPSVFLFPPKPKDTLMISRTPEVTCVVVDVSHEDPEVKFNWYVDGVEVHNAKTKPCEEQYGSTYRCVSVLTVLHQDWLNGKEYKCKVSNKALPAPIEKTISKAKGQPREPQVYTLPPSREEMTKNQVSLTCLVKGFYPSDIAVEWESNGQPENNYKTTPPVLDSDGSFFLYSKLTVDKSRWQQGNVFSCSVMHEALHNHYTQKSLSLSPGKGGGGSGGGGSGGGGSGGGGSGGGGSGGGGSDKTHTCPPCPAPELLGGPSVFLFPPKPKDTLMISRTPEVTCVVVDVSHEDPEVKFNWYVDGVEVHNAKTKPCEEQYGSTYRCVSVLTVLHQDWLNGKEYKCKVSNKALPAPIEKTISKAKGQPREPQVYTLPPSREEMTKNQVSLTCLVKGFYPSDIAVEWESNGQPENNYKTTPPVLDSDGSFFLYSKLTVDKSRWQQGNVFSCSVMHEALHNHYTQKSLSLSPGKGGGGSGGGGSGGGGSQVQLVQSGAEVKKPGASVKVSCKASGYTFTNYWMNWVRQAPGQCLEWMGNIAYGVKGTNYNQKFQGRVTMTVDTSSSTAYMELSRLRSDDTAVYYCATRYFYVMDYWGQGTLVTVSSGGGGSGGGGSGGGGSDIQMTQSPSSLSASVGDRVTITCRASQDISNYLNWYQQKPGKVPKLLIYYTSRLHSGVPSRFSGSGSGTDFTLTISSLQPEDVATYYCVQYAQFPLTFGCGTKVEIKSGGGGSEVQLVESGGGLVQPGGSLKLSCAASGFTFNKYAINWVREAPGKGLEWVARIRSKYNNYATYYADAVKDRFTISRDDSKNTAYLQMNNLKTEDTAVYYCVRNANFGTSYISYFAYWGQGTLVTVSSGGGGSGGGGSGGGGSQTVVTQEPSLTVSPGGTVTLTCGSSTGAVTSGNYPNWVQKKPGQAPRGLIGGTKFLAPGTPARFSGSLLGGKAALTLSGVQPEDEAEYYCVLWYSNRWVFGSGTKLTVL

SEQ ID NO: 1077 - protein, 1506 aa, Synthetic construct
QVQLQESGPGLVKPSETLSLTCTVSGGSISSSSYFWGWIRQPPGKCLEWIGNIYYSGSSNYNPSLKSRVTISVDTSKNQFSLKLSSVTAADTAVYYCARLPRGDRDAFDIWGQGTMVTVSSGGGGSGGGGSGGGGSDIVMTQSPSSLSASVGDRVTITCRASQGISNYLAWYQQKPGKVPKLLIYAASTLQSGVPSRFSGSGSGTDFTLTISSLQPEDFATYYCQQSYSTPFTFGCGTKVEIKSGGGGSEVQLVESGGGLVQPGGSLKLSCAASGFTFNKYAMNWVRQAPGKGLEWVARIRSKYNNYATYYADSVKDRFTISRDDSKNTAYLQMNNLKTEDTAVYYCVRHGNFGNSYISYWAYWGQGTLVTVSSGGGGSGGGGSGGGGSQTVVTQEPSLTVSPGGTVTLTCGSSTGAVTSGNYPNWVQQKPGQAPRGLIGGTKFLAPGTPARFSGSLLGGKAALTLSGVQPEDEAEYYCVLWYSNRWVFGGGTKLTVLGGGGSGGGGSGGGGSDKTHTCPPCPAPELLGGPSVFLFPPKPKDTLMISRTPEVTCVVVDVSHEDPEVKFNWYVDGVEVHNAKTKPCEEQYGSTYRCVSVLTVLHQDWLNGKEYKCKVSNKALPAPIEKTISKAKGQPREPQVYTLPPSREEMTKNQVSLTCLVKGFYPSDIAVEWESNGQPENNYKTTPPVLDSDGSFFLYSKLTVDKSRWQQGNVFSCSVMHEALHNHYTQKSLSLSPGKGGGGSGGGGSGGGGSGGGGSGGGGSGGGGSDKTHTCPPCPAPELLGGPSVFLFPPKPKDTLMISRTPEVTCVVVDVSHEDPEVKFNWYVDGVEVHNAKTKPCEEQYGSTYRCVSVLTVLHQDWLNGKEYKCKVSNKALPAPIEKTISKAKGQPREPQVYTLPPSREEMTKNQVSLTCLVKGFYPSDIAVEWESNGQPENNYKTTPPVLDSDGSFFLYSKLTVDKSRWQQGNVFSCSVMHEALHNHYTQKSLSLSPGKGGGGSGGGGSGGGGSQVQLVQSGAEVKKPGASVKVSCKASGYTFTNYWMNWVRQAPGQCLEWMGNIAYGVKGTNYNQKFQGRVTMTVDTSSSTAYMELSRLRSDDTAVYYCATRYFYVMDYWGQGTLVTVSSGGGGSGGGGSGGGGSDIQMTQSPSSLSASVGDRVTITCRASQDISNYLNWYQQKPGKVPKLLIYYTSRLHSGVPSRFSGSGSGTDFTLTISSLQPEDVATYYCVQYAQFPLTFGCGTKVEIKSGGGGSEVQLVESGGGLVQPGGSLKLSCAASGFTFNKYAMNWVRQAPGKGLEWVARIRSKYNNYATYYADSVKDRFTISRDDSKNTAYLQMNNLKTEDTAVYYCVRHGNFGNSYISYWAYWGQGTLVTVSSGGGGSGGGGSGGGGSQTVVTQEPSLTVSPGGTVTLTCGSSTGAVTSGNYPNWVQQKPGQAPRGLIGGTKFLAPGTPARFSGSLLGGKAALTLSGVQPEDEAEYYCVLWYSNRWVFGGGTKLTVL

SEQ ID NO: 1078 - protein, 1506 aa, Synthetic construct; identical to SEQ ID NO: 301

SEQ ID NO: 1079 - protein, 1506 aa, Synthetic construct; identical to SEQ ID NO: 286

SEQ ID NO: 1080 - protein, 1506 aa, Synthetic construct
QVQLQESGPGLVKPSETLSLTCTVSGGSISSSSYFWGWIRQPPGKCLEWIGNIYYSGSSNYNPSLKSRVTISVDTSKNQFSLKLSSVTAADTAVYYCARLPRGDRDAFDIWGQGTMVTVSSGGGGSGGGGSGGGGSDIVMTQSPSSLSASVGDRVTITCRASQGISNYLAWYQQKPGKVPKLLIYAASTLQSGVPSRFSGSGSGTDFTLTISSLQPEDFATYYCQQSYSTPFTFGCGTKVEIKSGGGGSEVQLVESGGGLVQPGGSLKLSCAASGFTFNKYAINWVREAPGKGLEWVARIRSKYNNYATYYADAVKDRFTISRDDSKNTAYLQMNNLKTEDTAVYYCVRNANFGTSYISYFAYWGQGTLVTVSSGGGGSGGGGSGGGGSQTVVTQEPSLTVSPGGTVTLTCGSSTGAVTSGNYPNWVQKKPGQAPRGLIGGTKFLAPGTPARFSGSLLGGKAALTLSGVQPEDEAEYYCVLWYSNRWVFGSGTKLTVLGGGGSGGGGSGGGGSDKTHTCPPCPAPELLGGPSVFLFPPKPKDTLMISRTPEVTCVVVDVSHEDPEVKFNWYVDGVEVHNAKTKPCEEQYGSTYRCVSVLTVLHQDWLNGKEYKCKVSNKALPAPIEKTISKAKGQPREPQVYTLPPSREEMTKNQVSLTCLVKGFYPSDIAVEWESNGQPENNYKTTPPVLDSDGSFFLYSKLTVDKSRWQQGNVFSCSVMHEALHNHYTQKSLSLSPGKGGGGSGGGGSGGGGSGGGGSGGGGSGGGGSDKTHTCPPCPAPELLGGPSVFLFPPKPKDTLMISRTPEVTCVVVDVSHEDPEVKFNWYVDGVEVHNAKTKPCEEQYGSTYRCVSVLTVLHQDWLNGKEYKCKVSNKALPAPIEKTISKAKGQPREPQVYTLPPSREEMTKNQVSLTCLVKGFYPSDIAVEWESNGQPENNYKTTPPVLDSDGSFFLYSKLTVDKSRWQQGNVFSCSVMHEALHNHYTQKSLSLSPGKGGGGSGGGGSGGGGSQVQLVQSGAEVKKPGASVKVSCKASGYTFTNYWMNWVRQAPGQCLEWMGNIAYGVKGTNYNQKFQGRVTMTVDTSSSTAYMELSRLRSDDTAVYYCATRYFYVMDYWGQGTLVTVSSGGGGSGGGGSGGGGSDIQMTQSPSSLSASVGDRVTITCRASQDISNYLNWYQQKPGKVPKLLIYYTSRLHSGVPSRFSGSGSGTDFTLTISSLQPEDVATYYCVQYAQFPLTFGCGTKVEIKSGGGGSEVQLVESGGGLVQPGGSLKLSCAASGFTFNKYAMNWVRQAPGKGMEWVARIRSKYNNYATYYADAVKDRFTISRDDSKNTLYLQMNNLKTEDTAVYYCVRAGNFGSSYISYFAYWGQGTLVTVSSGGGGSGGGGSGGGGSQTVVTQEPSLTVSPGGTVTITCGSSTGAVTSGNYPNWIQKKPGQAPRGLIGGTKFLAPGTPARFSGSLEGGKAALTLSGVQPEDEAEYYCVLYYSNRWVFGSGTKLTVL

SEQ ID NO: 1081 - protein, 76 aa, Synthetic construct [sequence omitted]

SEQ ID NO: 1082 - protein, 378 aa, Synthetic construct
AAAIGIDLGTTYSCVGVFQHGKVEIIANDQGNRTTPSYVAFTDTERLIGDAAKNQVALNPQNTVFDAKRLIGRKFGDPVVQSDMKHWPFQVINDGDKPKVQVSYKGETKAFYPEEISSMVLTKMKEIAEAYLGYPVTNAVITVPAYFNDSQRQATKDAGVIAGLNVLRIINEPTAAAIAYGLDRTGKGERNVLIFDLGGGTFDVSILTIDDGIFEVKATAGDTHLGGEDFDNRLVNHFVEEFKRKHKKDISQNKRAVRRLRTACERAKRTLSSSTQASLEIDSLFEGIDFYTSITRARFEELCSDLFRSTLEPVEKALRDAKLDKAQIHDLVLVGGSTRIPKVQKLLQDFFNGRDLNKSINPDEAVAYGAAVQAAILM

SEQ ID NO: 1083 - protein, 97 aa, Synthetic construct
MIQRTPKIQVYSRHPAENGKSNFLNCYVSGFHPSDIEVDLLKNGERIEKVEHSDLSFSKDWSFYLLYYTEFTPTEKDEYACRVNHVTLSQPKIVKWD

SEQ ID NO: 1084 - protein, 90 aa, Synthetic construct
DMEIAYPITCGESKAILLWKKFVCPGINVKCVKFNDQLISPKHFVHLAGKSTLKDWKRAIRLGGIMLRKMMDSGQIDFYQHDKVCSNTCR

SEQ ID NO: 1085 - protein, 238 aa, Synthetic construct
MSKGEELFTGVVPILVELDGDVNGHKFSVSGEGEGDATYGKLTLKFICTTGKLPVPWPTLVTTFTYGVQCFSRYPDHMKRHDFFKSAMPEGYVQERTIFFKDDGNYKTRAEVKFEGDTLVNRIELKGIDFKEDGNILGHKLEYNYNSHNVYIMADKQKNGIKVNFKIRHNIEDGSVQLADHYQQNTPIGDGPVLLPDNHYLSTQSALSKDPNEKRDHMVLLEFVTAAGITHGMDELYK

SEQ ID NO: 1086 - protein, 129 aa, Synthetic construct
QVQLQESGGGLVQAGDSLKLSCEASGDSIGTYVIGWFRQAPGKERIYLATIGRNLVGPSDFYTRYADSVKGRFAVSRDNAKNTVNLQMNSLKPEDTAVYYCAAKTTTWGGNDPNNWNYWGQGTQVTVSS

SEQ ID NO: 1087 - protein, 48 aa, Synthetic construct
GSAMGCRHFQSCSQCLSAPPFVQCGWCHDKCVRSEECLSGTWTQQICL

SEQ ID NO: 1088 - protein, 90 aa, Synthetic construct
RLDAPSQIEVKDVTDTTALITWFKPLAEIDGIELTYGIKDVPGDRTTIDLTEDENQYSIGNLKPDTEYEVSLISRRGDMSSNPAKETFTT

SEQ ID NO: 1089 - protein, 127 aa, Synthetic construct [sequence omitted]

SEQ ID NO: 1090 - protein, 129 aa, Synthetic construct [sequence omitted]

SEQ ID NO: 1091 - protein, 167 aa, Synthetic construct
DPAGLLDLRQGMFAQLVAQNVLLIDGPLSWYSDPGLAGVSLTGGLSYKEDTKELVVAKAGVYYVFFQMELRRVVAGEGSGSVSLALHLMPLRSAAGAAALALTVDLPPASSEARNSAFGFQGRLLHLSAGQRLGVHLHTEARARHAWQLTQGATVLGLFRVTPEIPA

SEQ ID NO: 1092 - protein, 133 aa, Synthetic construct
APTSSSTKKTQLQLEHLLLDLQMILNGINNYKNPKLTRMLTFKFYMPKKATELKHLQCLEEELKPLEEVLNLAQSKNFHLRPRDLISNINVIVLELKGSETTFMCEYADETATIVEFLNRWITFAQSIISTLT

SEQ ID NO: 1093 - protein, 126 aa, Synthetic construct
AFTVTVPKDLYVVEYGSNMTIECKFPVEKELDLAALIVYWEMEDKNIIQFVHGEEDLKVQHSSYRQRARLLKDQLSLGNAALQITDVKLQDAGVYRCMISYGGADYKRITVKVNAPYAAALEHHHH

SEQ ID NO: 1094 - protein, 107 aa, Synthetic construct
SEYRAEVGQNAYLPCFYTPAAPGNLVPVCWGKGACPVFECGNVVLRTDERDVNYWTSRYWLNGDFRKGDVSLTIENVTLADSGIYCCRIQIPGIMNDEKFNLKLVIK

SEQ ID NO: 1095 - protein, 115 aa, Synthetic construct
MEKSFVITDPRLPDNPIIFASDGFLELTEYSREEILGRNGRFLQGPETDQATVQKIRDAIRDQREITVQLINYTKSGKKFWNLLHLQPMRDQKGELQYFIGVQLDGEFIPNPLLG

SEQ ID NO: 1096 - protein, 46 aa, Synthetic construct
AEAAAKEAAAKEAAAKEAAAKALEAEAAAKEAAAKEAAAKEAAAKA

SEQ ID NO: 1097 - protein, 51 aa, Synthetic construct
PAPAPAPAPAPAPAPAPAPAPAPAPAPAPAPAPAPAPAPAPAPAPAPAPAP

SEQ ID NO: 1098 - protein, 113 aa, Synthetic construct
VTTLSGLSGEQGPSGDMTTEEDSATHIKFSKRDEDGRELAGATMELRDSSGKTISTWISDGHVKDFYLYPGKYTFVETAAPDGYEVATAITFTVNEQGQVTVNGEATKGDAHT

SEQ ID NO: 1099 - protein, 14 aa, Synthetic construct
VPTIVMVDAYKRYK

SEQ ID NO: 1100 - protein, 23 aa, Synthetic construct
DIPATYEFTDGKHYITNEPIPPK

SEQ ID NO: 1101 - protein, 12 aa, Synthetic construct
KLGSIEFIKVNK

SEQ ID NO: 1102 - protein, 740 aa, Synthetic construct
QVQLQESGPGLVKPSETLSLTCTVSGGSISSSSYFWGWIRQPPGKCLEWIGNIYYSGSSNYNPSLKSRVTISVDTSKNQFSLKLSSVTAADTAVYYCARLPRGDRDAFDIWGQGTMVTVSSGGGGSGGGGSGGGGSDIVMTQSPSSLSASVGDRVTITCRASQGISNYLAWYQQKPGKVPKLLIYAASTLQSGVPSRFSGSGSGTDFTLTISSLQPEDFATYYCQQSYSTPFTFGCGTKVEIKSGGGGSGGGGSGGGGSDKTHTCPPCPAPELLGGPSVFLFPPKPKDTLMISRTPEVTCVVVDVSHEDPEVKFNWYVDGVEVHNAKTKPCEEQYGSTYRCVSVLTVLHQDWLNGKEYKCKVSNKALPAPIEKTISKAKGQPREPQVYTLPPSREEMTKNQVSLTCLVKGFYPSDIAVEWESNGQPENNYDTTPPVLDSDGSFFLYSDLTVDKSRWQQGNVFSCSVMHEALHNHYTQDSLSLSPGKGGGGSGGGGSGGGGSQVQLVQSGAEVKKPGASVKVSCKASGYTFTNYWMNWVRQAPGQCLEWMGNIAYGVKGTNYNQKFQGRVTMTVDTSSSTAYMELSRLRSDDTAVYYCATRYFYVMDYWGQGTLVTVSSGGGGSGGGGSGGGGSDIQMTQSPSSLSASVGDRVTITCRASQDISNYLNWYQQKPGKVPKLLIYYTSRLHSGVPSRFSGSGSGTDFTLTISSLQPEDVATYYCVQYAQFPLTFGCGTKVEIK

SEQ ID NO: 1103 - protein, 755 aa, Synthetic construct
EVQLVESGGGLVQPGGSLKLSCAASGFTFNKYAMNWVRQAPGKGMEWVARIRSKYNNYATYYADAVKDRFTISRDDSKNTLYLQMNNLKTEDTAVYYCVRAGNFGSSYISYFAYWGQGTLVTVSSGGGGSGGGGSGGGGSQTVVTQEPSLTVSPGGTVTITCGSSTGAVTSGNYPNWIQKKPGQAPRGLIGGTKFLAPGTPARFSGSLEGGKAALTLSGVQPEDEAEYYCVLYYSNRWVFGSGTKLTVLGGGGSGGGGSGGGGSDKTHTCPPCPAPELLGGPSVFLFPPKPKDTLMISRTPEVTCVVVDVSHEDPEVKFNWYVDGVEVHNAKTKPCEEQYGSTYRCVSVLTVLHQDWLNGKEYKCKVSNKALPAPIEKTISKAKGQPREPQVYTLPPSRKEMTKNQVSLTCLVKGFYPSDIAVEWESNGQPENNYKTTPPVLKSDGSFFLYSKLTVDKSRWQQGNVFSCSVMHEALHNHYTQKSLSLSPGKGGGGSGGGGSGGGGSEVQLVESGGGLVQPGGSLKLSCAASGFTFNKYAMNWVRQAPGKGMEWVARIRSKYNNYATYYADAVKDRFTISRDDSKNTLYLQMNNLKTEDTAVYYCVRAGNFGSSYISYFAYWGQGTLVTVSSGGGGSGGGGSGGGGSQTVVTQEPSLTVSPGGTVTITCGSSTGAVTSGNYPNWIQKKPGQAPRGLIGGTKFLAPGTPARFSGSLEGGKAALTLSGVQPEDEAEYYCVLYYSNRWVFGSGTKLTVL

SEQ ID NO: 1104 - protein, 1960 aa, Synthetic construct
QVQLVQSGAEVKKPGASVKVSCKASGYTFTDYYMHWVRQAPGQGLEWMGWINPNSGGPNYAQKFQGRVTMTRDTSISTAHMELSRLRSDDTAVYYCAREKHAVAGIGFDYWGQGTLVTVSSASTKGPSVFPLAPSSKSTSGGTAALGCLVKDYFPEPVTVSWNSGALTSGVHTFPAVLQSSGLYSLSSVVTVPSSSLGTQTYICNVNHKPSNTKVDKKVEPKSCGGGGSGGGGSGGGGSGGGGSGGGGSGGGGSGGGGSGGGGSDIQMTQSPSSVSASVGDRVTITCQASQDISNYLNWYQQKPGKAPKLLIYAASSLESGVPSRFSGSGSGTDFTLTISSLQPEDFATYYCQQANSFPLTFGPGTKVDIKRTVAAPSVFIFPPSDEQLKSGTASVVCLLNNFYPREAKVQWKVDNALQSGNSQESVTEQDSKDSTYSLSSTLTLSKADYEKHKVYACEVTHQGLSSPVTKSFNRGECSGGGGSEVQLVESGGGLVQPGGSLKLSCAASGFTFNKYAMNWVRQAPGKCLEWVARIRSKYNNYATYYADSVKDRFTISRDDSKNTAYLQMNNLKTEDTAVYYCVRHGNFGNSYISYWAYWGQGTLVTVSSGGGGSGGGGSGGGGSQTVVTQEPSLTVSPGGTVTLTCGSSTGAVTSGNYPNWVQQKPGQAPRGLIGGTKFLAPGTPARFSGSLLGGKAALTLSGVQPEDEAEYYCVLWYSNRWVFGCGTKLTVLGGGGDKTHTCPPCPAPELLGGPSVFLFPPKPKDTLMISRTPEVTCVVVDVSHEDPEVKFNWYVDGVEVHNAKTKPCEEQYGSTYRCVSVLTVLHQDWLNGKEYKCKVSNKALPAPIEKTISKAKGQPREPQVYTLPPSREEMTKNQVSLTCLVKGFYPSDIAVEWESNGQPENNYKTTPPVLDSDGSFFLYSKLTVDKSRWQQGNVFSCSVMHEALHNHYTQKSLSLSPGKGGGGSGGGGSGGGGSGGGGSGGGGSGGGGSDKTHTCPPCPAPELLGGPSVFLFPPKPKDTLMISRTPEVTCVVVDVSHEDPEVKFNWYVDGVEVHNAKTKPCEEQYGSTYRCVSVLTVLHQDWLNGKEYKCKVSNKALPAPIEKTISKAKGQPREPQVYTLPPSREEMTKNQVSLTCLVKGFYPSDIAVEWESNGQPENNYKTTPPVLDSDGSFFLYSKLTVDKSRWQQGNVFSCSVMHEALHNHYTQKSLSLSPGKGGGGQVTLKESGPTLVKPTETLTLTCTVSGFSFRNARMGVSWIRQPPGKALEWLAHIFSNDEKSYSTSLKSRLTISKDTSKSQVVLTMTNMDPVDTATYFCARVPEYSSGWYRFDYWGQGTLVTVSSASTKGPSVFPLAPSSKSTSGGTAALGCLVKDYFPEPVTVSWNSGALTSGVHTFPAVLQSSGLYSLSSVVTVPSSSLGTQTYICNVNHKPSNTKVDKKVEPKSCGGGGSGGGGSGGGGSGGGGSGGGGSGGGGSGGGGSGGGGSDIQMTQSPSSLSASVGDRVTISCRASQSIRSYLNWYQQKPGKAPKLLIYATSSLQGGVPSRFSGSGSGTDFTLTISSLQPEDFATYYCQQSYSTPFTFGPGTKVEIKRTVAAPSVFIFPPSDEQLKSGTASVVCLLNNFYPREAKVQWKVDNALQSGNSQESVTEQDSKDSTYSLSSTLTLSKADYEKHKVYACEVTHQGLSSPVTKSFNRGECSGGGGSEVQLVESGGGLVQPGGSLKLSCAASGFTFNKYAMNWVRQAPGKCLEWVARIRSKYNNYATYYADSVKDRFTISRDDSKNTAYLQMNNLKTEDTAVYYCVRHGNFGNSYISYWAYWGQGTLVTVSSGGGGSGGGGSGGGGSQTVVTQEPSLTVSPGGTVTLTCGSSTGAVTSGNYPNWVQQKPGQAPRGLIGGTKFLAPGTPARFSGSLLGGKAALTLSGVQPEDEAEYYCVLWYSNRWVFGCGTKLTVL

SEQ ID NO: 1105 - protein, 5 aa, Synthetic construct
DYYMH

SEQ ID NO: 1106 - protein, 17 aa, Synthetic construct
WINPNSGGPNYAQKFQG

SEQ ID NO: 1107 - protein, 12 aa, Synthetic construct
EKHAVAGIGFDY

SEQ ID NO: 1108 - protein, 11 aa, Synthetic construct
QASQDISNYLN

SEQ ID NO: 1109 - protein, 7 aa, Synthetic construct
AASSLES

SEQ ID NO: 1110 - protein, 9 aa, Synthetic construct
QQANSFPLT

SEQ ID NO: 1111 - protein, 121 aa, Synthetic construct
QVQLVQSGAEVKKPGASVKVSCKASGYTFTDYYMHWVRQAPGQGLEWMGWINPNSGGPNYAQKFQGRVTMTRDTSISTAHMELSRLRSDDTAVYYCAREKHAVAGIGFDYWGQGTLVTVSS

SEQ ID NO: 1112 - protein, 107 aa, Synthetic construct
DIQMTQSPSSVSASVGDRVTITCQASQDISNYLNWYQQKPGKAPKLLIYAASSLESGVPSRFSGSGSGTDFTLTISSLQPEDFATYYCQQANSFPLTFGPGTKVDIK

SEQ ID NO: 1113 - protein, 103 aa, Synthetic construct
ASTKGPSVFPLAPSSKSTSGGTAALGCLVKDYFPEPVTVSWNSGALTSGVHTFPAVLQSSGLYSLSSVVTVPSSSLGTQTYICNVNHKPSNTKVDKKVEPKSC

SEQ ID NO: 1114 - protein, 107 aa, Synthetic construct [sequence omitted]

SEQ ID NO: 1115 - protein, 7 aa, Synthetic construct
NARMGVS

SEQ ID NO: 1116 - protein, 16 aa, Synthetic construct
HIFSNDEKSYSTSLKS

SEQ ID NO: 1117 - protein, 13 aa, Synthetic construct
VPEYSSGWYRFDY

SEQ ID NO: 1118 - protein, 11 aa, Synthetic construct
RASQSIRSYLN

SEQ ID NO: 1119 - protein, 7 aa, Synthetic construct
ATSSLQG

SEQ ID NO: 1120 - protein, 9 aa, Synthetic construct
QQSYSTPFT

SEQ ID NO: 1121 - protein, 123 aa, Synthetic construct
QVTLKESGPTLVKPTETLTLTCTVSGFSFRNARMGVSWIRQPPGKALEWLAHIFSNDEKSYSTSLKSRLTISKDTSKSQVVLTMTNMDPVDTATYFCARVPEYSSGWYRFDYWGQGTLVTVSS

SEQ ID NO: 1122 - protein, 107 aa, Synthetic construct
DIQMTQSPSSLSASVGDRVTISCRASQSIRSYLNWYQQKPGKAPKLLIYATSSLQGGVPSRFSGSGSGTDFTLTISSLQPEDFATYYCQQSYSTPFTFGPGTKVEIK

SEQ ID NO: 1123 - protein, 103 aa, Synthetic construct; identical to SEQ ID NO: 1113

SEQ ID NO: 1124 - protein, 107 aa, Synthetic construct [sequence omitted]

SEQ ID NO: 1125 - protein, 40 aa, Synthetic construct
GGGGSGGGGSGGGGSGGGGSGGGGSGGGGSGGGGSGGGGS

SEQ ID NO: 1126 - protein, 5 aa, Synthetic construct
DYAMH

SEQ ID NO: 1127 - protein, 17 aa, Synthetic construct
GISWNSGSIGYADSVKG

SEQ ID NO: 1128 - protein, 14 aa, Synthetic construct
DSRGYGDYRLGGAY

SEQ ID NO: 1129 - protein, 11 aa, Synthetic construct
RASQSVSSNLA

SEQ ID NO: 1130 - protein, 7 aa, Synthetic construct
GASTRAT

SEQ ID NO: 1131 - protein, 9 aa, Synthetic construct
QQYNNWPWT

SEQ ID NO: 1132 - protein, 123 aa, Synthetic construct
EVQLVESGGGLVQPGRSLRLSCAASGFTFDDYAMHWVRQAPGKGLEWVSGISWNSGSIGYADSVKGRFTISRDNAKNSLYLQMNSLRAEDTALYYCAKDSRGYGDYRLGGAYWGQGTLVTVSS

SEQ ID NO: 1133 - protein, 107 aa, Synthetic construct
EIVMTQSPATLSVSPGERATLSCRASQSVSSNLAWYQQKPGQAPRLLIYGASTRATGIPARFSGSGSGTEFTLTISSLQSEDFAVYYCQQYNNWPWTFGQGTKVEIK

SEQ ID NO: 1134 - protein, 103 aa, Synthetic construct; identical to SEQ ID NO: 1113

SEQ ID NO: 1135 - protein, 107 aa, Synthetic construct [sequence omitted]

SEQ ID NO: 1136 - protein, 5 aa, Synthetic construct
TYAMN

SEQ ID NO: 1137 - protein, 19 aa, Synthetic construct
RIRSKYNNYATYYAASVKK

SEQ ID NO: 1138 - protein, 14 aa, Synthetic construct
HGNFGNSYVSWFAY

SEQ ID NO: 1139 - protein, 14 aa, Synthetic construct
RSSTGAVTTSNYAN

SEQ ID NO: 1140 - protein, 7 aa, Synthetic construct
GTNKRAP

SEQ ID NO: 1141 - protein, 9 aa, Synthetic construct
ALWYSNLWV

SEQ ID NO: 1142 - protein, 5 aa, Synthetic construct
TYAMN

SEQ ID NO: 1143 - protein, 19 aa, Synthetic construct
RIRSKYNNYATYYADSVKG

SEQ ID NO: 1144 - protein, 14 aa, Synthetic construct
HGNFGNSYVSWFAY

SEQ ID NO: 1145 - protein, 13 aa, Synthetic construct
GSSTGAVTSNYAN

SEQ ID NO: 1146 - protein, 7 aa, Synthetic construct
GTNKRAP

SEQ ID NO: 1147 - protein, 9 aa, Synthetic construct
ALWYSNLWV

SEQ ID NO: 1148 - protein, 5 aa, Synthetic construct
KYAIN

SEQ ID NO: 1149 - protein, 18 aa, Synthetic construct
RIRSKYNNYATYYAQVKD

SEQ ID NO: 1150 - protein, 14 aa, Synthetic construct
HANFGNSYISYWAY

SEQ ID NO: 1151 - protein, 14 aa, Synthetic construct
ASSTGAVTSGNYPN

SEQ ID NO: 1152 - protein, 7 aa, Synthetic construct
GTKFLVP

SEQ ID NO: 1153 - protein, 9 aa, Synthetic construct
TLWYSNRWV

SEQ ID NO: 1154 - skipped

SEQ ID NO: 1155 - protein, 17 aa, Synthetic construct
XIXXXXXXTXYXXXXXG

SEQ ID NO: 1156 - protein, 18 aa, Synthetic construct
SRGVYDXXXXXXXYXMDX

SEQ ID NO: 1157 - protein, 126 aa, Synthetic construct
XVQLXXSGXXXXXPGXSXXXSCXASGXXFXXXXXXWVRQXPGXCLEWXXXIXXXXXTXYXXXXXGRXTXXXDXSXXTXYXXXXXLXXXDXAVYYCAXXRGVYDFKXXXALXXXDXWGQGTXVTVSS

SEQ ID NO: 1158 - protein, 17 aa, Synthetic construct
XXSXXXLYSSNQXXYXX

SEQ ID NO: 1159-1160 - skipped (2 entries)

SEQ ID NO: 1161 - protein, 111 aa, Synthetic construct
XIXXTQSPXXLXXSXGXRXTXXCXXSXXXLYNQXXYXXWYQQKPGXXPXLLXYXXXXXXXGVPXRFSGSGSGTXFTLXISXLQXEDXXXYYCXXXXXXPXTFGCGTKXXIK

SEQ ID NO: 1162-1163 - skipped (2 entries)

SEQ ID NO: 1164 - protein, 21 aa, Synthetic construct
XXXXXGXXSYXPXXXXXXXDX

SEQ ID NO: 1165 - protein, 132 aa, Synthetic construct
XVQLXXSGXXXXXPXXXXXXXCXXSGGSXXXXXYXXXWXRQXPGXXLEWXXXIXXXXXXXXYXXXXXXRXTXXXDXXXXXXXXXXXXXXXXDTAVYYCAXXXXXXXXXSYYPXYYXXXXDXWGQGTXVTVSS

SEQ ID NO: 1166-1168 - skipped (3 entries)

SEQ ID NO: 1169 - protein, 108 aa, Synthetic construct
XXXXTQXPXXXSXSXGXXXXXCRXXXXXXXXXXXWYQQKPGXXPXLXIYXXXXXXXGXPXRFSGSXSGXXXTLTISXXXXXDXAXYYCQXXXXXXIXXFGXGTKXXXX

SEQ ID NO: 1170 - protein, 829 aa, Homo sapiens
MGLPRGPLASLLLLQVCWLQCAASEPCRAVFREAEVTLEAGGAEQEPGQALGKVFMGCPGQEPALFSTDNDDFTVRNGETVQERRSLKERNPLKIFPSKRILRRHKRDWVVAPISVPENGKGPFPQRLNQLKSNKDRDTKIFYSITGPGADSPPEGVFAVEKETGWLLLNKPLDREEIAKYELFGHAVSENGASVEDPMNISIIVTDQNDHKPKFTQDTFRGSVLEGVLPGTSVMQVTATDEDDAIYTYNGVVAYSIHSQEPKDPHDLMFTIHRSTGTISVISSGLDREKVPEYTLTIQATDMDGDGSTTTAVAVVEILDANDNAPMFDPQKYEAHVPENAVGHEVQRLTVTDLDAPNSPAWRATYLIMGGDDGDHFTITTHPESNQGILTTRKGLDFEAKNQHTLYVEVTNEAPFVLKLPTSTATIVVHVEDVNEAPVFVPPSKVVEVQEGIPTGEPVCVYTAEDPDKENQKISYRILRDPAGWLAMDPDSGQVTAVGTLDREDEQFVRNNIYEVMVLAMDNGSPPTTGTGTLLLTLIDVNDHGPVPEPRQITICNQSPVRQVLNITDKDLSPHTSPFQAQLTDDSDIYWTAEVNEEGDTVVLSLKKFLKQDTYDVHLSLSDHGNKEQLTVIRATVCDCHGHVETCPGPWKGGFILPVLGAVLALLFLLLVLLLLVRKKRKIKEPLLLPEDDTRDNVFYYGEEGGGEEDQDYDITQLHRGLEARPEVVLRNDVAPTIIPTPMYRPRPANPDEIGNFIIENLKAANTDPTAPPYDTLLVFDYEGSGSDAASLSSLTSSASDQDQDYDYLNEWGSRFKKLADMYGGGEDD

SEQ ID NO: 1171 - protein, 38 aa, Homo sapiens
VAYSIHSQEPKDPHDLMFTIHRSTGTISVISSGLDREK

SEQ ID NO: 1172 - protein, 37 aa, Homo sapiens
VPEYTLTIQATDMDGDGSTTTAVAVVEILDANDNAPM

SEQ ID NO: 1173 - protein, 36 aa, Homo sapiens
FDPQKYEAHVPENAVGHEVQRLTVTDLDAPNSPAWR

SEQ ID NO: 1174 - protein, 36 aa, Homo sapiens
YRILRDPAGWLAMDPDSGQVTAVGTLDREDEQFVRN

SEQ ID NO: 1175 - protein, 51 aa, Homo sapiens
EVEKTACPSGKKAREIDESLIFYKKWELEACVDAALLATQMDRVNAIPFTY

SEQ ID NO: 1176 - protein, 38 aa, Homo sapiens
EQLDVLKHKLDELYPQGYPESVIQHLGYLFLKMSPEDI

SEQ ID NO: 1177 - protein, 69 aa, Homo sapiens
RKWNVTSLETLKALLEVNKGHEMSPQVATLIDRFVKGRGQLDKDTLDTLTAFYPGYLCSLSPEELSSVP

SEQ ID NO: 1178 - protein, 48 aa, Homo sapiens
PSSIWAVRPQDLDTCDPRQLDVLYPKARLAFQNMNGSEYFVKIQSFLG

SEQ ID NO: 1179 - protein, 44 aa, Homo sapiens
GAPTEDLKALSQQNVSMDLATFMKLRTDAVLPLTVAEVQKLLGP

SEQ ID NO: 1180 - protein, 622 aa, Homo sapiens
MALPTARPLLGSCGTPALGSLLFLLFSLGWVQPSRTLAGETGQEAAPLDGVLANPPNISSLSPRQLLGFPCAEVSGLSTERVRELAVALAQKNVKLSTEQLRCLAHRLSEPPEDLDALPLDLLLFLNPDAFSGPQACTRFFSRITKANVDLLPRGAPERQRLLPAALACWGVRGSLLSEADVRALGGLACDLPGRFVAESAEVLLPRLVSCPGPLDQDQQEAARAALQGGGPPYGPPSTWSVSTMDALRGLLPVLGQPIIRSIPQGIVAAWRQRSSRDPSWRQPERTILRPRFRREVEKTACPSGKKAREIDESLIFYKKWELEACVDAALLATQMDRVNAIPFTYEQLDVLKHKLDELYPQGYPESVIQHLGYLFLKMSPEDIRKWNVTSLETLKALLEVNKGHEMSPQVATLIDRFVKGRGQLDKDTLDTLTAFYPGYLCSLSPEELSSVPPSSIWAVRPQDLDTCDPRQLDVLYPKARLAFQNMNGSEYFVKIQSFLGGAPTEDLKALSQQNVSMDLATFMKLRTDAVLPLTVAEVQKLLGPHVEGLKAEERHRPVRDWILRQRQDDLDTLGLGLQGGIPNGYLVLDLSMQEALSGTPCLLGPGPVLTVLALLLASTLA

SEQ ID NO: 1181 - protein, 630 aa, Homo sapiens
MALPTARPLLGSCGTPALGSLLFLLFSLGWVQPSRTLAGETGQEAAPLDGVLANPPNISSLSPRQLLGFPCAEVSGLSTERVRELAVALAQKNVKLSTEQLRCLAHRLSEPPEDLDALPLDLLLFLNPDAFSGPQACTRFFSRITKANVDLLPRGAPERQRLLPAALACWGVRGSLLSEADVRALGGLACDLPGRFVAESAEVLLPRLVSCPGPLDQDQQEAARAALQGGGPPYGPPSTWSVSTMDALRGLLPVLGQPIIRSIPQGIVAAWRQRSSRDPSWRQPERTILRPRFRREVEKTACPSGKKAREIDESLIFYKKWELEACVDAALLATQMDRVNAIPFTYEQLDVLKHKLDELYPQGYPESVIQHLGYLFLKMSPEDIRKWNVTSLETLKALLEVNKGHEMSPQAPRRPLPQVATLIDRFVKGRGQLDKDTLDTLTAFYPGYLCSLSPEELSSVPPSSIWAVRPQDLDTCDPRQLDVLYPKARLAFQNMNGSEYFVKIQSFLGGAPTEDLKALSQQNVSMDLATFMKLRTDAVLPLTVAEVQKLLGPHVEGLKAEERHRPVRDWILRQRQDDLDTLGLGLQGGIPNGYLVLDLSMQEALSGTPCLLGPGPVLTVLALLLASTLA

SEQ ID NO: 1182 - protein, 622 aa, Homo sapiens [sequence omitted]

SEQ ID NO: 1183 - protein, 982 aa, Synthetic construct; identical to SEQ ID NO: 417

SEQ ID NO: 1184 - protein, 4 aa, Synthetic construct
GGGG

SEQ ID NO: 1185 - protein, 5 aa, Synthetic construct
GGGGG

SEQ ID NO: 1186 - protein, 6 aa, Synthetic construct
SGGGGQ

SEQ ID NO: 1187 - protein, 15 aa, Synthetic construct
GGGGQGGGGQGGGGQ

SEQ ID NO: 1188 - protein, 474 aa, Synthetic construct; identical to SEQ ID NO: 33

SEQ ID NO: 1189 - protein, 227 aa, Synthetic construct; identical to SEQ ID NO: 35

SEQ ID NO: 1190 - protein, 227 aa, Synthetic construct; identical to SEQ ID NO: 36

SEQ ID NO: 1191 - protein, 222 aa, Synthetic construct
CPPCPAPELLGGPSVFLFPPKPKDTLMISRTPEVTCVVVDVSHEDPEVKFNWYVDGVEVHNAKTKPCEEQYGSTYRCVSVLTVLHQDWLNGKEYKCKVSNKALPAPIEKTISKAKGQPREPQVYTLPPSREEMTKNQVSLTCLVKGFYPSDIAVEWESNGQPENNYDTTPPVLDSDGSFFLYSDLTVDKSRWQQGNVFSCSVMHEALHNHYTQDSLSLSPGK

SEQ ID NO: 1192 - protein, 222 aa, Synthetic construct
CPPCPAPELLGGPSVFLFPPKPKDTLMISRTPEVTCVVVDVSHEDPEVKFNWYVDGVEVHNAKTKPCEEQYGSTYRCVSVLTVLHQDWLNGKEYKCKVSNKALPAPIEKTISKAKGQPREPQVYTLPPSRKEMTKNQVSLTCLVKGFYPSDIAVEWESNGQPENNYKTTPPVLKSDGSFFLYSKLTVDKSRWQQGNVFSCSVMHEALHNHYTQKSLSLSPGK

SEQ ID NO: 1193 - protein, 5 aa, Synthetic construct
KYAMN

SEQ ID NO: 1194 - protein, 19 aa, Synthetic construct
RIRSKYNNYATYYADAVKD

SEQ ID NO: 1195 - protein, 14 aa, Synthetic construct
AGNFGSSYISYFAY

SEQ ID NO: 1196 - protein, 14 aa, Synthetic construct
GSSTGAVTSGNYPN

SEQ ID NO: 1197 - protein, 7 aa, Synthetic construct
GTKFLAP

SEQ ID NO: 1198 - protein, 9 aa, Synthetic construct
VLYYSNRWV

SEQ ID NO: 1199 - protein, 125 aa, Synthetic construct; identical to SEQ ID NO: 67

SEQ ID NO: 1200 - protein, 109 aa, Synthetic construct; identical to SEQ ID NO: 68

SEQ ID NO: 1201 - protein, 7 aa, Synthetic construct
SSSYFWG

SEQ ID NO: 1202 - protein, 16 aa, Synthetic construct
NIYYSGSSNYNPSLKS

SEQ ID NO: 1203 - protein, 11 aa, Synthetic construct
LPRGDRDAFDI

SEQ ID NO: 1204 - protein, 11 aa, Synthetic construct
RASQGISNYLA

SEQ ID NO: 1205 - protein, 7 aa, Synthetic construct
AASTLQS

SEQ ID NO: 1206 - protein, 9 aa, Synthetic construct
QQSYSTPFT

SEQ ID NO: 1207 - protein, 121 aa, Synthetic construct; identical to SEQ ID NO: 92

SEQ ID NO: 1208 - protein, 107 aa, Synthetic construct; identical to SEQ ID NO: 94

SEQ ID NO: 1209 - protein, 5 aa, Synthetic construct
NYWMN

SEQ ID NO: 1210 - protein, 17 aa, Synthetic construct
NIAYGVAGTNYNQKFQG

SEQ ID NO: 1211 - protein, 8 aa, Synthetic construct
RYFYVMDY

SEQ ID NO: 1212 - protein, 11 aa, Synthetic construct
RASQDISNYLN

SEQ ID NO: 1213 - protein, 7 aa, Synthetic construct
YTSRLHS

SEQ ID NO: 1214 - protein, 9 aa, Synthetic construct
VQYAQFPLT

SEQ ID NO: 1215 - protein, 117 aa, Synthetic construct; identical to SEQ ID NO: 433

SEQ ID NO: 1216 - protein, 107 aa, Synthetic construct; identical to SEQ ID NO: 202

SEQ ID NO: 1217 - protein, 5 aa, Synthetic construct
KYAMN

SEQ ID NO: 1218 - protein, 19 aa, Synthetic construct
RIRSKYNNYATYYADAVKD

SEQ ID NO: 1219 - protein, 14 aa, Synthetic construct
AGNFGSSYISYFAY

SEQ ID NO: 1220 - protein, 14 aa, Synthetic construct
GSSTGAVTSGNYPN

SEQ ID NO: 1221 - protein, 7 aa, Synthetic construct
GTKFLAP

SEQ ID NO: 1222 - protein, 9 aa, Synthetic construct
VLYYSNRWV

SEQ ID NO: 1223 - protein, 125 aa, Synthetic construct; identical to SEQ ID NO: 67

SEQ ID NO: 1224 - protein, 109 aa, Synthetic construct; identical to SEQ ID NO: 68

SEQ ID NO: 1225 - protein, 103 aa, Synthetic construct
ASTKGPSVFPLAPSSKSTSGGTAALGCLVKDYFPEPVTVSWNSGALTSGVHTFPAVLQSSGLYSLESVVTVPSSSLGTQTYICNVNHKPSNTKVDKKVEPKSC

SEQ ID NO: 1226 - protein, 106 aa, Synthetic construct
GQPKAAPSVTLFPPSSEELQANKATLVCLISDFYPGAVTVAWKADSSPVKAGVETTTPSKQSNNKYAAKSYLSLTPEQWKSHRSYSCQVTHEGSTVEKTVAPTECS

SEQ ID NO: 1227 - protein, 7 aa, Synthetic construct
SSSYFWG

SEQ ID NO: 1228 - protein, 16 aa, Synthetic construct
NIYYSGSSNYNPSLKS

SEQ ID NO: 1229 - protein, 11 aa, Synthetic construct
LPRGDRDAFDI

SEQ ID NO: 1230 - protein, 11 aa, Synthetic construct
RASQGISNYLA

SEQ ID NO: 1231 - protein, 7 aa, Synthetic construct
AASTLQS

SEQ ID NO: 1232 - protein, 9 aa, Synthetic construct
QQSYSTPFT

SEQ ID NO: 1233 - protein, 121 aa, Synthetic construct; identical to SEQ ID NO: 92

SEQ ID NO: 1234 - protein, 108 aa, Synthetic construct
EIVMTQSPSSLSASVGDRVTITCRASQGISNYLAWYQQKPGKVPKLLIYAASTLQSGVPSRFSGSGSGTDFTLTISSLQPEDFATYYCQQSYSTPFTFGCGTKVEIKR

SEQ ID NO: 1235 - protein, 103 aa, Synthetic construct; identical to SEQ ID NO: 1225

SEQ ID NO: 1236 - protein, 106 aa, Synthetic construct
TVAAPSVFIFPPSDEQLKSGTASVVCLLNNFYPREAKVQWKVDNALQSGNSQESVTEQDSKDSTYSLKSTLTLSKADYEKHKVYACEVTHQGLSSPVTKSFNRGEC

SEQ ID NO: 1237 - protein, 5 aa, Synthetic construct
NYWMN

SEQ ID NO: 1238 - protein, 17 aa, Synthetic construct
NIAYGVAGTNYNQKFQG

SEQ ID NO: 1239 - protein, 8 aa, Synthetic construct
RYFYVMDY

SEQ ID NO: 1240 - protein, 11 aa, Synthetic construct
RASQDISNYLN

SEQ ID NO: 1241 - protein, 7 aa, Synthetic construct
YTSRLHS

SEQ ID NO: 1242 - protein, 9 aa, Synthetic construct
VQYAQFPLT

SEQ ID NO: 1243 - protein, 117 aa, Synthetic construct; identical to SEQ ID NO: 433

SEQ ID NO: 1244 - protein, 108 aa, Synthetic construct
EIQMTQSPSSLSASVGDRVTITCRASQDISNYLNWYQQKPGKVPKLLIYYTSRLHSGVPSRFSGSGSGTDFTLTISSLQPEDVATYYCVQYAQFPLTFGCGTKVEIKR

SEQ ID NO: 1245 - protein, 103 aa, Synthetic construct
ASTKGPSVFPLAPSSKSTSGGTAALGCLVKDYFPEPVTVSWNSGALTSGVHTFPAVLQSSGLYSLKSVVTVPSSSLGTQTYICNVNHKPSNTKVDKKVEPKSC

SEQ ID NO: 1246 - protein, 106 aa, Synthetic construct
TVAAPSVFIFPPSDEQLKSGTASVVCLLNNFYPREAKVQWKVDNALQSGNSQESVTEQDSKDSTYSLESTLTLSKADYEKHKVYACEVTHQGLSSPVTKSFNRGEC

SEQ ID NO: 1247 - protein, 739 aa, Synthetic construct
QVQLVQSGAEVKKPGASVKVSCKASGYTFTNYWMNWVRQAPGQCLEWMGNIAYGVAGTNYNQKFQGRVTMTVDTSSSTAYMELSRLRSDDTAVYYCATRYFYVMDYWGQGTLVTVSSGGGGQGGGGQGGGGQEIQMTQSPSSLSASVGDRVTITCRASQDISNYLNWYQQKPGKVPKLLIYYTSRLHSGVPSRFSGSGSGTDFTLTISSLQPEDVATYYCVQYAQFPLTFGCGTKVEIKGGGGQGGGGQGGGGQDKTHTCPPCPAPELLGGPSVFLFPPKPKDTLMISRTPEVTCVVVDVSHEDPEVKFNWYVDGVEVHNAKTKPCEEQYGSTYRCVSVLTVLHQDWLNGKEYKCKVSNKALPAPIEKTISKAKGQPREPQVYTLPPSREEMTKNQVSLTCLVKGFYPSDIAVEWESNGQPENNYDTTPPVLDSDGSFFLYSDLTVDKSRWQQGNVFSCSVMHEALHNHYTQDSLSLSPGKGGGGQGGGGQGGGGQQVQLQESGPGLVKPSETLSLTCTVSGGSISSSSYFWGWIRQPPGKCLEWIGNIYYSGSSNYNPSLKSRVTISVDTSKNQFSLKLSSVTAADTAVYYCARLPRGDRDAFDIWGQGTMVTVSSGGGGQGGGGQGGGGQEIVMTQSPSSLSASVGDRVTITCRASQGISNYLAWYQQKPGKVPKLLIYAASTLQSGVPSRFSGSGSGTDFTLTISSLQPEDFATYYCQQSYSTPFTFGCGTKVEIK

SEQ ID NO: 1248 - protein, 755 aa, Synthetic construct
EVQLVESGGGLVQPGGSLKLSCAASGFTFNKYAMNWVRQAPGKGMEWVARIRSKYNNYATYYADAVKDRFTISRDDSKNTLYLQMNNLKTEDTAVYYCVRAGNFGSSYISYFAYWGQGTLVTVSSGGGGQGGGGQGGGGQQTVVTQEPSLTVSPGGTVTITCGSSTGAVTSGNYPNWIQKKPGQAPRGLIGGTKFLAPGTPARFSGSLEGGKAALTLSGVQPEDEAEYYCVLYYSNRWVFGSGTKLTVLGGGGQGGGGQGGGGQDKTHTCPPCPAPELLGGPSVFLFPPKPKDTLMISRTPEVTCVVVDVSHEDPEVKFNWYVDGVEVHNAKTKPCEEQYGSTYRCVSVLTVLHQDWLNGKEYKCKVSNKALPAPIEKTISKAKGQPREPQVYTLPPSRKEMTKNQVSLTCLVKGFYPSDIAVEWESNGQPENNYKTTPPVLKSDGSFFLYSKLTVDKSRWQQGNVFSCSVMHEALHNHYTQKSLSLSPGKGGGGQGGGGQGGGGQEVQLVESGGGLVQPGGSLKLSCAASGFTFNKYAMNWVRQAPGKGMEWVARIRSKYNNYATYYADAVKDRFTISRDDSKNTLYLQMNNLKTEDTAVYYCVRAGNFGSSYISYFAYWGQGTLVTVSSGGGGQGGGGQGGGGQQTVVTQEPSLTVSPGGTVTITCGSSTGAVTSGNYPNWIQKKPGQAPRGLIGGTKFLAPGTPARFSGSLEGGKAALTLSGVQPEDEAEYYCVLYYSNRWVFGSGTKLTVL

SEQ ID NO: 1249 - protein, 745 aa, Synthetic construct
QVQLVQSGAEVKKPGASVKVSCKASGYTFTNYWMNWVRQAPGQCLEWMGNIAYGVAGTNYNQKFQGRVTMTVDTSSSTAYMELSRLRSDDTAVYYCATRYFYVMDYWGQGTLVTVSSGGGGQGGGGQGGGGQEIQMTQSPSSLSASVGDRVTITCRASQDISNYLNWYQQKPGKVPKLLIYYTSRLHSGVPSRFSGSGSGTDFTLTISSLQPEDVATYYCVQYAQFPLTFGCGTKVEIKGGGGQGGGGQGGGGQDKTHTCPPCPAPELLGGPSVFLFPPKPKDTLMISRTPEVTCVVVDVSHEDPEVKFNWYVDGVEVHNAKTKPCEEQYGSTYRCVSVLTVLHQDWLNGKEYKCKVSNKALPAPIEKTISKAKGQPREPQVYTLPPSREEMTKNQVSLTCLVKGFYPSDIAVEWESNGQPENNYDTTPPVLDSDGSFFLYSDLTVDKSRWQQGNVFSCSVMHEALHNHYTQDSLSLSPGKGGGGQGGGGQGGGGQEVQLVESGGGLVQPGGSLKLSCAASGFTFNKYAMNWVRQAPGKGMEWVARIRSKYNNYATYYADAVKDRFTISRDDSKNTLYLQMNNLKTEDTAVYYCVRAGNFGSSYISYFAYWGQGTLVTVSSGGGGQGGGGQGGGGQQTVVTQEPSLTVSPGGTVTITCGSSTGAVTSGNYPNWIQKKPGQAPRGLIGGTKFLAPGTPARFSGSLEGGKAALTLSGVQPEDEAEYYCVLYYSNRWVFGSGTKLTVL

SEQ ID NO: 1250 - protein, 749 aa, Synthetic construct
EVQLVESGGGLVQPGGSLKLSCAASGFTFNKYAMNWVRQAPGKGMEWVARIRSKYNNYATYYADAVKDRFTISRDDSKNTLYLQMNNLKTEDTAVYYCVRAGNFGSSYISYFAYWGQGTLVTVSSGGGGQGGGGQGGGGQQTVVTQEPSLTVSPGGTVTITCGSSTGAVTSGNYPNWIQKKPGQAPRGLIGGTKFLAPGTPARFSGSLEGGKAALTLSGVQPEDEAEYYCVLYYSNRWVFGSGTKLTVLGGGGQGGGGQGGGGQDKTHTCPPCPAPELLGGPSVFLFPPKPKDTLMISRTPEVTCVVVDVSHEDPEVKFNWYVDGVEVHNAKTKPCEEQYGSTYRCVSVLTVLHQDWLNGKEYKCKVSNKALPAPIEKTISKAKGQPREPQVYTLPPSRKEMTKNQVSLTCLVKGFYPSDIAVEWESNGQPENNYKTTPPVLKSDGSFFLYSKLTVDKSRWQQGNVFSCSVMHEALHNHYTQKSLSLSPGKGGGGQGGGGQGGGGQQVQLQESGPGLVKPSETLSLTCTVSGGSISSSSYFWGWIRQPPGKCLEWIGNIYYSGSSNYNPSLKSRVTISVDTSKNQFSLKLSSVTAADTAVYYCARLPRGDRDAFDIWGQGTMVTVSSGGGGQGGGGQGGGGQEIVMTQSPSSLSASVGDRVTITCRASQGISNYLAWYQQKPGKVPKLLIYAASTLQSGVPSRFSGSGSGTDFTLTISSLQPEDFATYYCQQSYSTPFTFGCGTKVEIK

SEQ ID NO: 1251 - protein, 724 aa, Synthetic construct
CPPCPAPELLGGPSVFLFPPKPKDTLMISRTPEVTCVVVDVSHEDPEVKFNWYVDGVEVHNAKTKPCEEQYGSTYRCVSVLTVLHQDWLNGKEYKCKVSNKALPAPIEKTISKAKGQPREPQVYTLPPSRKEMTKNQVSLTCLVKGFYPSDIAVEWESNGQPENNYKTTPPVLKSDGSFFLYSKLTVDKSRWQQGNVFSCSVMHEALHNHYTQKSLSLSPGKGGGGQVQLQESGPGLVKPSETLSLTCTVSGGSISSSSYFWGWIRQPPGKCLEWIGNIYYSGSSNYNPSLKSRVTISVDTSKNQFSLKLSSVTAADTAVYYCARLPRGDRDAFDIWGQGTMVTVSSGGGGQGGGGQGGGGQEIVMTQSPSSLSASVGDRVTITCRASQGISNYLAWYQQKPGKVPKLLIYAASTLQSGVPSRFSGSGSGTDFTLTISSLQPEDFATYYCQQSYSTPFTFGCGTKVEIKSGGGGQEVQLVESGGGLVQPGGSLKLSCAASGFTFNKYAMNWVRQAPGKGMEWVARIRSKYNNYATYYADAVKDRFTISRDDSKNTLYLQMNNLKTEDTAVYYCVRAGNFGSSYISYFAYWGQGTLVTVSSGGGGQGGGGQGGGGQQTVVTQEPSLTVSPGGTVTITCGSSTGAVTSGNYPNWIQKKPGQAPRGLIGGTKFLAPGTPARFSGSLEGGKAALTLSGVQPEDEAEYYCVLYYSNRWVFGSGTKLTVL

SEQ ID NO: 1252 - protein, 447 aa, Synthetic construct
QVQLVQSGAEVKKPGASVKVSCKASGYTFTNYWMNWVRQAPGQCLEWMGNIAYGVAGTNYNQKFQGRVTMTVDTSSSTAYMELSRLRSDDTAVYYCATRYFYVMDYWGQGTLVTVSSASTKGPSVFPLAPSSKSTSGGTAALGCLVKDYFPEPVTVSWNSGALTSGVHTFPAVLQSSGLYSLKSVVTVPSSSLGTQTYICNVNHKPSNTKVDKKVEPKSCDKTHTCPPCPAPELLGGPSVFLFPPKPKDTLMISRTPEVTCVVVDVSHEDPEVKFNWYVDGVEVHNAKTKPCEEQYGSTYRCVSVLTVLHQDWLNGKEYKCKVSNKALPAPIEKTISKAKGQPREPQVYTLPPSREEMTKNQVSLTCLVKGFYPSDIAVEWESNGQPENNYDTTPPVLDSDGSFFLYSDLTVDKSRWQQGNVFSCSVMHEALHNHYTQDSLSLSPGK

SEQ ID NO: 1253 - protein, 214 aa, Synthetic construct
EIQMTQSPSSLSASVGDRVTITCRASQDISNYLNWYQQKPGKVPKLLIYYTSRLHSGVPSRFSGSGSGTDFTLTISSLQPEDVATYYCVQYAQFPLTFGCGTKVEIKRTVAAPSVFIFPPSDEQLKSGTASVVCLLNNFYPREAKVQWKVDNALQSGNSQESVTEQDSKDSTYSLESTLTLSKADYEKHKVYACEVTHQGLSSPVTKSFNRGEC

SEQ ID NO: 1254 - protein, 711 aa, Synthetic construct
QVQLVQSGAEVKKPGASVKVSCKASGYTFTNYWMNWVRQAPGQCLEWMGNIAYGVAGTNYNQKFQGRVTMTVDTSSSTAYMELSRLRSDDTAVYYCATRYFYVMDYWGQGTLVTVSSASTKGPSVFPLAPSSKSTSGGTAALGCLVKDYFPEPVTVSWNSGALTSGVHTFPAVLQSSGLYSLKSVVTVPSSSLGTQTYICNVNHKPSNTKVDKKVEPKSCDKTHTCPPCPAPELLGGPSVFLFPPKPKDTLMISRTPEVTCVVVDVSHEDPEVKFNWYVDGVEVHNAKTKPCEEQYGSTYRCVSVLTVLHQDWLNGKEYKCKVSNKALPAPIEKTISKAKGQPREPQVYTLPPSREEMTKNQVSLTCLVKGFYPSDIAVEWESNGQPENNYDTTPPVLDSDGSFFLYSDLTVDKSRWQQGNVFSCSVMHEALHNHYTQDSLSLSPGKGGGGQGGGGQGGGGQEVQLVESGGGLVQPGGSLKLSCAASGFTFNKYAMNWVRQAPGKGMEWVARIRSKYNNYATYYADAVKDRFTISRDDSKNTLYLQMNNLKTEDTAVYYCVRAGNFGSSYISYFAYWGQGTLVTVSSGGGGQGGGGQGGGGQQTVVTQEPSLTVSPGGTVTITCGSSTGAVTSGNYPNWIQKKPGQAPRGLIGGTKFLAPGTPARFSGSLEGGKAALTLSGVQPEDEAEYYCVLYYSNRWVFGSGTKLTVL

SEQ ID NO: 1255 - protein, 739 aa, Synthetic construct
EVQLVESGGGLVQPGGSLKLSCAASGFTFNKYAMNWVRQAPGKGMEWVARIRSKYNNYATYYADAVKDRFTISRDDSKNTLYLQMNNLKTEDTAVYYCVRAGNFGSSYISYFAYWGQGTLVTVSSGGGGQGGGGQGGGGQQTVVTQEPSLTVSPGGTVTITCGSSTGAVTSGNYPNWIQKKPGQAPRGLIGGTKFLAPGTPARFSGSLEGGKAALTLSGVQPEDEAEYYCVLYYSNRWVFGSGTKLTVLGGGGGDKTHTCPPCPAPELLGGPSVFLFPPKPKDTLMISRTPEVTCVVVDVSHEDPEVKFNWYVDGVEVHNAKTKPCEEQYGSTYRCVSVLTVLHQDWLNGKEYKCKVSNKALPAPIEKTISKAKGQPREPQVYTLPPSRKEMTKNQVSLTCLVKGFYPSDIAVEWESNGQPENNYKTTPPVLKSDGSFFLYSKLTVDKSRWQQGNVFSCSVMHEALHNHYTQKSLSLSPGKGGGGQGGGGQGGGGQQVQLQESGPGLVKPSETLSLTCTVSGGSISSSSYFWGWIRQPPGKCLEWIGNIYYSGSSNYNPSLKSRVTISVDTSKNQFSLKLSSVTAADTAVYYCARLPRGDRDAFDIWGQGTMVTVSSGGGGQGGGGQGGGGQEIVMTQSPSSLSASVGDRVTITCRASQGISNYLAWYQQKPGKVPKLLIYAASTLQSGVPSRFSGSGSGTDFTLTISSLQPEDFATYYCQQSYSTPFTFGCGTKVEIK

SEQ ID NO: 1256 - protein, 215 aa, Synthetic construct
QTVVTQEPSLTVSPGGTVTITCGSSTGAVTSGNYPNWIQKKPGQAPRGLIGGTKFLAPGTPARFSGSLEGGKAALTLSGVQPEDEAEYYCVLYYSNRWVFGSGTKLTVLGQPKAAPSVTLFPPSSEELQANKATLVCLISDFYPGAVTVAWKADSSPVKAGVETTTPSKQSNNKYAAKSYLSLTPEQWKSHRSYSCQVTHEGSTVEKTVAPTECS

SEQ ID NO: 1257 - protein, 957 aa, Synthetic construct
EVQLVESGGGLVQPGGSLKLSCAASGFTFNKYAMNWVRQAPGKGMEWVARIRSKYNNYATYYADAVKDRFTISRDDSKNTLYLQMNNLKTEDTAVYYCVRAGNFGSSYISYFAYWGQGTLVTVSSASTKGPSVFPLAPSSKSTSGGTAALGCLVKDYFPEPVTVSWNSGALTSGVHTFPAVLQSSGLYSLESVVTVPSSSLGTQTYICNVNHKPSNTKVDKKVEPKSCDKTHTCPPCPAPELLGGPSVFLFPPKPKDTLMISRTPEVTCVVVDVSHEDPEVKFNWYVDGVEVHNAKTKPCEEQYGSTYRCVSVLTVLHQDWLNGKEYKCKVSNKALPAPIEKTISKAKGQPREPQVYTLPPSRKEMTKNQVSLTCLVKGFYPSDIAVEWESNGQPENNYKTTPPVLKSDGSFFLYSKLTVDKSRWQQGNVFSCSVMHEALHNHYTQKSLSLSPGKGGGGQVQLQESGPGLVKPSETLSLTCTVSGGSISSSSYFWGWIRQPPGKCLEWIGNIYYSGSSNYNPSLKSRVTISVDTSKNQFSLKLSSVTAADTAVYYCARLPRGDRDAFDIWGQGTMVTVSSGGGGQGGGGQGGGGQEIVMTQSPSSLSASVGDRVTITCRASQGISNYLAWYQQKPGKVPKLLIYAASTLQSGVPSRFSGSGSGTDFTLTISSLQPEDFATYYCQQSYSTPFTFGCGTKVEIKSGGGGQEVQLVESGGGLVQPGGSLKLSCAASGFTFNKYAMNWVRQAPGKGMEWVARIRSKYNNYATYYADAVKDRFTISRDDSKNTLYLQMNNLKTEDTAVYYCVRAGNFGSSYISYFAYWGQGTLVTVSSGGGGQGGGGQGGGGQQTVVTQEPSLTVSPGGTVTITCGSSTGAVTSGNYPNWIQKKPGQAPRGLIGGTKFLAPGTPARFSGSLEGGKAALTLSGVQPEDEAEYYCVLYYSNRWVFGSGTKLTVL

SEQ ID NO: 1258 - protein, 713 aa, Synthetic construct
EVQLVESGGGLVQPGGSLKLSCAASGFTFNKYAMNWVRQAPGKGMEWVARIRSKYNNYATYYADAVKDRFTISRDDSKNTLYLQMNNLKTEDTAVYYCVRAGNFGSSYISYFAYWGQGTLVTVSSASTKGPSVFPLAPSSKSTSGGTAALGCLVKDYFPEPVTVSWNSGALTSGVHTFPAVLQSSGLYSLESVVTVPSSSLGTQTYICNVNHKPSNTKVDKKVEPKSCDKTHTCPPCPAPELLGGPSVFLFPPKPKDTLMISRTPEVTCVVVDVSHEDPEVKFNWYVDGVEVHNAKTKPCEEQYGSTYRCVSVLTVLHQDWLNGKEYKCKVSNKALPAPIEKTISKAKGQPREPQVYTLPPSRKEMTKNQVSLTCLVKGFYPSDIAVEWESNGQPENNYKTTPPVLKSDGSFFLYSKLTVDKSRWQQGNVFSCSVMHEALHNHYTQKSLSLSPGKGGGGQGGGGQGGGGQQVQLQESGPGLVKPSETLSLTCTVSGGSISSSSYFWGWIRQPPGKCLEWIGNIYYSGSSNYNPSLKSRVTISVDTSKNQFSLKLSSVTAADTAVYYCARLPRGDRDAFDIWGQGTMVTVSSGGGGQGGGGQGGGGQEIVMTQSPSSLSASVGDRVTITCRASQGISNYLAWYQQKPGKVPKLLIYAASTLQSGVPSRFSGSGSGTDFTLTISSLQPEDFATYYCQQSYSTPFTFGCGTKVEIK

SEQ ID NO: 1259 - protein, 720 aa, Synthetic construct
QVQLVQSGAEVKKPGASVKVSCKASGYTFTNYWMNWVRQAPGQCLEWMGNIAYGVAGTNYNQKFQGRVTMTVDTSSSTAYMELSRLRSDDTAVYYCATRYFYVMDYWGQGTLVTVSSGGGGQGGGGQGGGGQEIQMTQSPSSLSASVGDRVTITCRASQDISNYLNWYQQKPGKVPKLLIYYTSRLHSGVPSRFSGSGSGTDFTLTISSLQPEDVATYYCVQYAQFPLTFGCGTKVEIKSGGGGQEVQLVESGGGLVQPGGSLKLSCAASGFTFNKYAMNWVRQAPGKGMEWVARIRSKYNNYATYYADAVKDRFTISRDDSKNTLYLQMNNLKTEDTAVYYCVRAGNFGSSYISYFAYWGQGTLVTVSSGGGGQGGGGQGGGGQQTVVTQEPSLTVSPGGTVTITCGSSTGAVTSGNYPNWIQKKPGQAPRGLIGGTKFLAPGTPARFSGSLEGGKAALTLSGVQPEDEAEYYCVLYYSNRWVFGSGTKLTVLGGGGCPPCPAPELLGGPSVFLFPPKPKDTLMISRTPEVTCVVVDVSHEDPEVKFNWYVDGVEVHNAKTKPCEEQYGSTYRCVSVLTVLHQDWLNGKEYKCKVSNKALPAPIEKTISKAKGQPREPQVYTLPPSREEMTKNQVSLTCLVKGFYPSDIAVEWESNGQPENNYDTTPPVLDSDGSFFLYSDLTVDKSRWQQGNVFSCSVMHEALHNHYTQDSLSLSPGK

SEQ ID NO: 1260 - protein, 949 aa, Synthetic construct
QVQLVQSGAEVKKPGASVKVSCKASGYTFTNYWMNWVRQAPGQCLEWMGNIAYGVAGTNYNQKFQGRVTMTVDTSSSTAYMELSRLRSDDTAVYYCATRYFYVMDYWGQGTLVTVSSASTKGPSVFPLAPSSKSTSGGTAALGCLVKDYFPEPVTVSWNSGALTSGVHTFPAVLQSSGLYSLKSVVTVPSSSLGTQTYICNVNHKPSNTKVDKKVEPKSCDKTHTCPPCPAPELLGGPSVFLFPPKPKDTLMISRTPEVTCVVVDVSHEDPEVKFNWYVDGVEVHNAKTKPCEEQYGSTYRCVSVLTVLHQDWLNGKEYKCKVSNKALPAPIEKTISKAKGQPREPQVYTLPPSREEMTKNQVSLTCLVKGFYPSDIAVEWESNGQPENNYDTTPPVLDSDGSFFLYSDLTVDKSRWQQGNVFSCSVMHEALHNHYTQDSLSLSPGKGGGGQVQLQESGPGLVKPSETLSLTCTVSGGSISSSSYFWGWIRQPPGKCLEWIGNIYYSGSSNYNPSLKSRVTISVDTSKNQFSLKLSSVTAADTAVYYCARLPRGDRDAFDIWGQGTMVTVSSGGGGQGGGGQGGGGQEIVMTQSPSSLSASVGDRVTITCRASQGISNYLAWYQQKPGKVPKLLIYAASTLQSGVPSRFSGSGSGTDFTLTISSLQPEDFATYYCQQSYSTPFTFGCGTKVEIKSGGGGQEVQLVESGGGLVQPGGSLKLSCAASGFTFNKYAMNWVRQAPGKGMEWVARIRSKYNNYATYYADAVKDRFTISRDDSKNTLYLQMNNLKTEDTAVYYCVRAGNFGSSYISYFAYWGQGTLVTVSSGGGGQGGGGQGGGGQQTVVTQEPSLTVSPGGTVTITCGSSTGAVTSGNYPNWIQKKPGQAPRGLIGGTKFLAPGTPARFSGSLEGGKAALTLSGVQPEDEAEYYCVLYYSNRWVFGSGTKLTVL

SEQ ID NO: 1261 - protein, 481 aa, Synthetic construct
EVQLVESGGGLVQPGGSLKLSCAASGFTFNKYAMNWVRQAPGKGMEWVARIRSKYNNYATYYADAVKDRFTISRDDSKNTLYLQMNNLKTEDTAVYYCVRAGNFGSSYISYFAYWGQGTLVTVSSGGGGQGGGGQGGGGQQTVVTQEPSLTVSPGGTVTITCGSSTGAVTSGNYPNWIQKKPGQAPRGLIGGTKFLAPGTPARFSGSLEGGKAALTLSGVQPEDEAEYYCVLYYSNRWVFGSGTKLTVLGGGGGDKTHTCPPCPAPELLGGPSVFLFPPKPKDTLMISRTPEVTCVVVDVSHEDPEVKFNWYVDGVEVHNAKTKPCEEQYGSTYRCVSVLTVLHQDWLNGKEYKCKVSNKALPAPIEKTISKAKGQPREPQVYTLPPSRKEMTKNQVSLTCLVKGFYPSDIAVEWESNGQPENNYKTTPPVLKSDGSFFLYSKLTVDKSRWQQGNVFSCSVMHEALHNHYTQKSLSLSPGK

SEQ ID NO: 1262 - protein, 705 aa, Synthetic construct
QVQLVQSGAEVKKPGASVKVSCKASGYTFTNYWMNWVRQAPGQCLEWMGNIAYGVAGTNYNQKFQGRVTMTVDTSSSTAYMELSRLRSDDTAVYYCATRYFYVMDYWGQGTLVTVSSASTKGPSVFPLAPSSKSTSGGTAALGCLVKDYFPEPVTVSWNSGALTSGVHTFPAVLQSSGLYSLKSVVTVPSSSLGTQTYICNVNHKPSNTKVDKKVEPKSCDKTHTCPPCPAPELLGGPSVFLFPPKPKDTLMISRTPEVTCVVVDVSHEDPEVKFNWYVDGVEVHNAKTKPCEEQYGSTYRCVSVLTVLHQDWLNGKEYKCKVSNKALPAPIEKTISKAKGQPREPQVYTLPPSREEMTKNQVSLTCLVKGFYPSDIAVEWESNGQPENNYDTTPPVLDSDGSFFLYSDLTVDKSRWQQGNVFSCSVMHEALHNHYTQDSLSLSPGKGGGGQGGGGQGGGGQQVQLQESGPGLVKPSETLSLTCTVSGGSISSSSYFWGWIRQPPGKCLEWIGNIYYSGSSNYNPSLKSRVTISVDTSKNQFSLKLSSVTAADTAVYYCARLPRGDRDAFDIWGQGTMVTVSSGGGGQGGGGQGGGGQEIVMTQSPSSLSASVGDRVTITCRASQGISNYLAWYQQKPGKVPKLLIYAASTLQSGVPSRFSGSGSGTDFTLTISSLQPEDFATYYCQQSYSTPFTFGCGTKVEIK

SEQ ID NO: 1263 - protein, 745 aa, Synthetic construct
EVQLVESGGGLVQPGGSLKLSCAASGFTFNKYAMNWVRQAPGKGMEWVARIRSKYNNYATYYADAVKDRFTISRDDSKNTLYLQMNNLKTEDTAVYYCVRAGNFGSSYISYFAYWGQGTLVTVSSGGGGQGGGGQGGGGQQTVVTQEPSLTVSPGGTVTITCGSSTGAVTSGNYPNWIQKKPGQAPRGLIGGTKFLAPGTPARFSGSLEGGKAALTLSGVQPEDEAEYYCVLYYSNRWVFGSGTKLTVLGGGGGDKTHTCPPCPAPELLGGPSVFLFPPKPKDTLMISRTPEVTCVVVDVSHEDPEVKFNWYVDGVEVHNAKTKPCEEQYGSTYRCVSVLTVLHQDWLNGKEYKCKVSNKALPAPIEKTISKAKGQPREPQVYTLPPSRKEMTKNQVSLTCLVKGFYPSDIAVEWESNGQPENNYKTTPPVLKSDGSFFLYSKLTVDKSRWQQGNVFSCSVMHEALHNHYTQKSLSLSPGKGGGGQGGGGQGGGGQEVQLVESGGGLVQPGGSLKLSCAASGFTFNKYAMNWVRQAPGKGMEWVARIRSKYNNYATYYADAVKDRFTISRDDSKNTLYLQMNNLKTEDTAVYYCVRAGNFGSSYISYFAYWGQGTLVTVSSGGGGQGGGGQGGGGQQTVVTQEPSLTVSPGGTVTITCGSSTGAVTSGNYPNWIQKKPGQAPRGLIGGTKFLAPGTPARFSGSLEGGKAALTLSGVQPEDEAEYYCVLYYSNRWVFGSGTKLTVL

SEQ ID NO: 1264 - protein, 455 aa, Synthetic construct
EVQLVESGGGLVQPGGSLKLSCAASGFTFNKYAMNWVRQAPGKGMEWVARIRSKYNNYATYYADAVKDRFTISRDDSKNTLYLQMNNLKTEDTAVYYCVRAGNFGSSYISYFAYWGQGTLVTVSSASTKGPSVFPLAPSSKSTSGGTAALGCLVKDYFPEPVTVSWNSGALTSGVHTFPAVLQSSGLYSLESVVTVPSSSLGTQTYICNVNHKPSNTKVDKKVEPKSCDKTHTCPPCPAPELLGGPSVFLFPPKPKDTLMISRTPEVTCVVVDVSHEDPEVKFNWYVDGVEVHNAKTKPCEEQYGSTYRCVSVLTVLHQDWLNGKEYKCKVSNKALPAPIEKTISKAKGQPREPQVYTLPPSRKEMTKNQVSLTCLVKGFYPSDIAVEWESNGQPENNYKTTPPVLKSDGSFFLYSKLTVDKSRWQQGNVFSCSVMHEALHNHYTQKSLSLSPGK

SEQ ID NO: 1265 - protein, 719 aa, Synthetic construct
EVQLVESGGGLVQPGGSLKLSCAASGFTFNKYAMNWVRQAPGKGMEWVARIRSKYNNYATYYADAVKDRFTISRDDSKNTLYLQMNNLKTEDTAVYYCVRAGNFGSSYISYFAYWGQGTLVTVSSASTKGPSVFPLAPSSKSTSGGTAALGCLVKDYFPEPVTVSWNSGALTSGVHTFPAVLQSSGLYSLESVVTVPSSSLGTQTYICNVNHKPSNTKVDKKVEPKSCDKTHTCPPCPAPELLGGPSVFLFPPKPKDTLMISRTPEVTCVVVDVSHEDPEVKFNWYVDGVEVHNAKTKPCEEQYGSTYRCVSVLTVLHQDWLNGKEYKCKVSNKALPAPIEKTISKAKGQPREPQVYTLPPSRKEMTKNQVSLTCLVKGFYPSDIAVEWESNGQPENNYKTTPPVLKSDGSFFLYSKLTVDKSRWQQGNVFSCSVMHEALHNHYTQKSLSLSPGKGGGGQGGGGQGGGGQEVQLVESGGGLVQPGGSLKLSCAASGFTFNKYAMNWVRQAPGKGMEWVARIRSKYNNYATYYADAVKDRFTISRDDSKNTLYLQMNNLKTEDTAVYYCVRAGNFGSSYISYFAYWGQGTLVTVSSGGGGQGGGGQGGGGQQTVVTQEPSLTVSPGGTVTITCGSSTGAVTSGNYPNWIQKKPGQAPRGLIGGTKFLAPGTPARFSGSLEGGKAALTLSGVQPEDEAEYYCVLYYSNRWVFGSGTKLTVL

SEQ ID NO: 1266 - protein, 707 aa, Synthetic construct
QVQLVQSGAEVKKPGASVKVSCKASGYTFTNYWMNWVRQAPGQCLEWMGNIAYGVAGTNYNQKFQGRVTMTVDTSSSTAYMELSRLRSDDTAVYYCATRYFYVMDYWGQGTLVTVSSASTKGPSVFPLAPSSKSTSGGTAALGCLVKDYFPEPVTVSWNSGALTSGVHTFPAVLQSSGLYSLKSVVTVPSSSLGTQTYICNVNHKPSNTKVDKKVEPKSCSGGGGQEVQLVESGGGLVQPGGSLKLSCAASGFTFNKYAMNWVRQAPGKGMEWVARIRSKYNNYATYYADAVKDRFTISRDDSKNTLYLQMNNLKTEDTAVYYCVRAGNFGSSYISYFAYWGQGTLVTVSSGGGGQGGGGQGGGGQQTVVTQEPSLTVSPGGTVTITCGSSTGAVTSGNYPNWIQKKPGQAPRGLIGGTKFLAPGTPARFSGSLEGGKAALTLSGVQPEDEAEYYCVLYYSNRWVFGSGTKLTVLGGGGGDKTHTCPPCPAPELLGGPSVFLFPPKPKDTLMISRTPEVTCVVVDVSHEDPEVKFNWYVDGVEVHNAKTKPCEEQYGSTYRCVSVLTVLHQDWLNGKEYKCKVSNKALPAPIEKTISKAKGQPREPQVYTLPPSREEMTKNQVSLTCLVKGFYPSDIAVEWESNGQPENNYDTTPPVLDSDGSFFLYSDLTVDKSRWQQGNVFSCSVMHEALHNHYTQDSLSLSPGK

SEQ ID NO: 1267 - protein, 455 aa, Synthetic construct
DKTHTCPPCPAPELLGGPSVFLFPPKPKDTLMISRTPEVTCVVVDVSHEDPEVKFNWYVDGVEVHNAKTKPCEEQYGSTYRCVSVLTVLHQDWLNGKEYKCKVSNKALPAPIEKTISKAKGQPREPQVYTLPPSRKEMTKNQVSLTCLVKGFYPSDIAVEWESNGQPENNYKTTPPVLKSDGSFFLYSKLTVDKSRWQQGNVFSCSVMHEALHNHYTQKSLSLSPGKGGGGQVQLQESGPGLVKPSETLSLTCTVSGGSISSSSYFWGWIRQPPGKCLEWIGNIYYSGSSNYNPSLKSRVTISVDTSKNQFSLKLSSVTAADTAVYYCARLPRGDRDAFDIWGQGTMVTVSSASTKGPSVFPLAPSSKSTSGGTAALGCLVKDYFPEPVTVSWNSGALTSGVHTFPAVLQSSGLYSLESVVTVPSSSLGTQTYICNVNHKPSNTKVDKKVEPKSC

SEQ ID NO: 1268 - protein, 469 aa, Synthetic construct
EIVMTQSPSSLSASVGDRVTITCRASQGISNYLAWYQQKPGKVPKLLIYAASTLQSGVPSRFSGSGSGTDFTLTISSLQPEDFATYYCQQSYSTPFTFGCGTKVEIKRTVAAPSVFIFPPSDEQLKSGTASVVCLLNNFYPREAKVQWKVDNALQSGNSQESVTEQDSKDSTYSLKSTLTLSKADYEKHKVYACEVTHQGLSSPVTKSFNRGECSGGGGQEVQLVESGGGLVQPGGSLKLSCAASGFTFNKYAMNWVRQAPGKGMEWVARIRSKYNNYATYYADAVKDRFTISRDDSKNTLYLQMNNLKTEDTAVYYCVRAGNFGSSYISYFAYWGQGTLVTVSSGGGGQGGGGQGGGGQQTVVTQEPSLTVSPGGTVTITCGSSTGAVTSGNYPNWIQKKPGQAPRGLIGGTKFLAPGTPARFSGSLEGGKAALTLSGVQPEDEAEYYCVLYYSNRWVFGSGTKLTVL

SEQ ID NO: 1269 - protein, 702 aa, Synthetic construct
EVQLVESGGGLVQPGGSLKLSCAASGFTFNKYAMNWVRQAPGKGMEWVARIRSKYNNYATYYADAVKDRFTISRDDSKNTLYLQMNNLKTEDTAVYYCVRAGNFGSSYISYFAYWGQGTLVTVSSGGGGQGGGGQGGGGQQTVVTQEPSLTVSPGGTVTITCGSSTGAVTSGNYPNWIQKKPGQAPRGLIGGTKFLAPGTPARFSGSLEGGKAALTLSGVQPEDEAEYYCVLYYSNRWVFGSGTKLTVLSGGGGQQVQLVQSGAEVKKPGASVKVSCKASGYTFTNYWMNWVRQAPGQCLEWMGNIAYGVAGTNYNQKFQGRVTMTVDTSSSTAYMELSRLRSDDTAVYYCATRYFYVMDYWGQGTLVTVSSASTKGPSVFPLAPSSKSTSGGTAALGCLVKDYFPEPVTVSWNSGALTSGVHTFPAVLQSSGLYSLKSVVTVPSSSLGTQTYICNVNHKPSNTKVDKKVEPKSCDKTHTCPPCPAPELLGGPSVFLFPPKPKDTLMISRTPEVTCVVVDVSHEDPEVKFNWYVDGVEVHNAKTKPCEEQYGSTYRCVSVLTVLHQDWLNGKEYKCKVSNKALPAPIEKTISKAKGQPREPQVYTLPPSREEMTKNQVSLTCLVKGFYPSDIAVEWESNGQPENNYDTTPPVLDSDGSFFLYSDLTVDKSRWQQGNVFSCSVMHEALHNHYTQDSLSLSPGK

SEQ ID NO: 1270 - protein, 710 aa, Synthetic construct
DKTHTCPPCPAPELLGGPSVFLFPPKPKDTLMISRTPEVTCVVVDVSHEDPEVKFNWYVDGVEVHNAKTKPCEEQYGSTYRCVSVLTVLHQDWLNGKEYKCKVSNKALPAPIEKTISKAKGQPREPQVYTLPPSRKEMTKNQVSLTCLVKGFYPSDIAVEWESNGQPENNYKTTPPVLKSDGSFFLYSKLTVDKSRWQQGNVFSCSVMHEALHNHYTQKSLSLSPGKGGGGEVQLVESGGGLVQPGGSLKLSCAASGFTFNKYAMNWVRQAPGKGMEWVARIRSKYNNYATYYADAVKDRFTISRDDSKNTLYLQMNNLKTEDTAVYYCVRAGNFGSSYISYFAYWGQGTLVTVSSGGGGQGGGGQGGGGQQTVVTQEPSLTVSPGGTVTITCGSSTGAVTSGNYPNWIQKKPGQAPRGLIGGTKFLAPGTPARFSGSLEGGKAALTLSGVQPEDEAEYYCVLYYSNRWVFGSGTKLTVLSGGGGQQVQLQESGPGLVKPSETLSLTCTVSGGSISSSSYFWGWIRQPPGKCLEWIGNIYYSGSSNYNPSLKSRVTISVDTSKNQFSLKLSSVTAADTAVYYCARLPRGDRDAFDIWGQGTMVTVSSASTKGPSVFPLAPSSKSTSGGTAALGCLVKDYFPEPVTVSWNSGALTSGVHTFPAVLQSSGLYSLESVVTVPSSSLGTQTYICNVNHKPSNTKVDKKVEPKSC

SEQ ID NO: 1271 - protein, 214 aa, Synthetic construct
EIVMTQSPSSLSASVGDRVTITCRASQGISNYLAWYQQKPGKVPKLLIYAASTLQSGVPSRFSGSGSGTDFTLTISSLQPEDFATYYCQQSYSTPFTFGCGTKVEIKRTVAAPSVFIFPPSDEQLKSGTASVVCLLNNFYPREAKVQWKVDNALQSGNSQESVTEQDSKDSTYSLKSTLTLSKADYEKHKVYACEVTHQGLSSPVTKSFNRGEC

SEQ ID NO: 1272 - protein, 1474 aa, Synthetic construct; identical to SEQ ID NO: 435

SEQ ID NO: 1273 - protein, 1181 aa, Synthetic construct
QVQLVQSGAEVKKPGASVKVSCKASGYTFTNYWMNWVRQAPGQCLEWMGNIAYGVAGTNYNQKFQGRVTMTVDTSSSTAYMELSRLRSDDTAVYYCATRYFYVMDYWGQGTLVTVSSASTKGPSVFPLAPSSKSTSGGTAALGCLVKDYFPEPVTVSWNSGALTSGVHTFPAVLQSSGLYSLKSVVTVPSSSLGTQTYICNVNHKPSNTKVDKKVEPKSCSGGGGQEVQLVESGGGLVQPGGSLKLSCAASGFTFNKYAMNWVRQAPGKGMEWVARIRSKYNNYATYYADAVKDRFTISRDDSKNTLYLQMNNLKTEDTAVYYCVRAGNFGSSYISYFAYWGQGTLVTVSSGGGGQGGGGQGGGGQQTVVTQEPSLTVSPGGTVTITCGSSTGAVTSGNYPNWIQKKPGQAPRGLIGGTKFLAPGTPARFSGSLEGGKAALTLSGVQPEDEAEYYCVLYYSNRWVFGSGTKLTVLGGGGCPPCPAPELLGGPSVFLFPPKPKDTLMISRTPEVTCVVVDVSHEEPEVKFNWYVDGVEVHNAKTKPCEEQYGSTYRCVSVLTVLHQDWLNGKEYKCKVSNKALPAPIEKTISKAKGQPREPQVYTLPPSREEMTKNQVSLTCLVKGFYPSDIAVEWESNGQPENNYKTTPPVLDSDGSFFLYSKLTVDKSRWQQGNVFSCSVMHEALHNHYTQKSLSLSPGKGGGGQGGGGQGGGGQGGGGQGGGGQGGGGQCPPCPAPELLGGPSVFLFPPKPKDTLMISRTPEVTCVVVDVSHEEPEVKFNWYVDGVEVHNAKTKPCEEQYGSTYRCVSVLTVLHQDWLNGKEYKCKVSNKALPAPIEKTISKAKGQPREPQVYTLPPSREEMTKNQVSLTCLVKGFYPSDIAVEWESNGQPENNYKTTPPVLDSDGSFFLYSKLTVDKSRWQQGNVFSCSVMHEALHNHYTQKSLSLSPGKGGGGQVQLQESGPGLVKPSETLSLTCTVSGGSISSSSYFWGWIRQPPGKCLEWIGNIYYSGSSNYNPSLKSRVTISVDTSKNQFSLKLSSVTAADTAVYYCARLPRGDRDAFDIWGQGTMVTVSSASTKGPSVFPLAPSSKSTSGGTAALGCLVKDYFPEPVTVSWNSGALTSGVHTFPAVLQSSGLYSLESVVTVPSSSLGTQTYICNVNHKPSNTKVDKKVEPKSC

SEQ ID NO: 1274 - protein, 699 aa, Synthetic construct
QVQLVQSGAEVKKPGASVKVSCKASGYTFTNYWMNWVRQAPGQCLEWMGNIAYGVAGTNYNQKFQGRVTMTVDTSSSTAYMELSRLRSDDTAVYYCATRYFYVMDYWGQGTLVTVSSGGGGQGGGGQGGGGQEIQMTQSPSSLSASVGDRVTITCRASQDISNYLNWYQQKPGKVPKLLIYYTSRLHSGVPSRFSGSGSGTDFTLTISSLQPEDVATYYCVQYAQFPLTFGCGTKVEIKGGGGQEVQLVESGGGLVQPGGSLKLSCAASGFTFNKYAMNWVRQAPGKGMEWVARIRSKYNNYATYYADAVKDRFTISRDDSKNTLYLQMNNLKTEDTAVYYCVRAGNFGSSYISYFAYWGQGTLVTVSSASTKGPSVFPLAPSSKSTSGGTAALGCLVKDYFPEPVTVSWNSGALTSGVHTFPAVLQSSGLYSLESVVTVPSSSLGTQTYICNVNHKPSNTKVDKKVEPKSCDKTHTCPPCPAPELLGGPSVFLFPPKPKDTLMISRTPEVTCVVVDVSHEDPEVKFNWYVDGVEVHNAKTKPCEEQYGSTYRCVSVLTVLHQDWLNGKEYKCKVSNKALPAPIEKTISKAKGQPREPQVYTLPPSREEMTKNQVSLTCLVKGFYPSDIAVEWESNGQPENNYDTTPPVLDSDGSFFLYSDLTVDKSRWQQGNVFSCSVMHEALHNHYTQDSLSLSPGK

SEQ ID NO: 1275 - protein, 707 aa, Synthetic construct
DKTHTCPPCPAPELLGGPSVFLFPPKPKDTLMISRTPEVTCVVVDVSHEDPEVKFNWYVDGVEVHNAKTKPCEEQYGSTYRCVSVLTVLHQDWLNGKEYKCKVSNKALPAPIEKTISKAKGQPREPQVYTLPPSRKEMTKNQVSLTCLVKGFYPSDIAVEWESNGQPENNYKTTPPVLKSDGSFFLYSKLTVDKSRWQQGNVFSCSVMHEALHNHYTQKSLSLSPGKGGGGQVQLQESGPGLVKPSETLSLTCTVSGGSISSSSYFWGWIRQPPGKCLEWIGNIYYSGSSNYNPSLKSRVTISVDTSKNQFSLKLSSVTAADTAVYYCARLPRGDRDAFDIWGQGTMVTVSSGGGGQGGGGQGGGGQEIVMTQSPSSLSASVGDRVTITCRASQGISNYLAWYQQKPGKVPKLLIYAASTLQSGVPSRFSGSGSGTDFTLTISSLQPEDFATYYCQQSYSTPFTFGCGTKVEIKGGGGQEVQLVESGGGLVQPGGSLKLSCAASGFTFNKYAMNWVRQAPGKGMEWVARIRSKYNNYATYYADAVKDRFTISRDDSKNTLYLQMNNLKTEDTAVYYCVRAGNFGSSYISYFAYWGQGTLVTVSSASTKGPSVFPLAPSSKSTSGGTAALGCLVKDYFPEPVTVSWNSGALTSGVHTFPAVLQSSGLYSLESVVTVPSSSLGTQTYICNVNHKPSNTKVDKKVEPKSC

SEQ ID NO: 1276 - protein, 1430 aa, Synthetic construct
QVQLVQSGAEVKKPGASVKVSCKASGYTFTNYWMNWVRQAPGQCLEWMGNIAYGVAGTNYNQKFQGRVTMTVDTSSSTAYMELSRLRSDDTAVYYCATRYFYVMDYWGQGTLVTVSSGGGGQGGGGQGGGGQEIQMTQSPSSLSASVGDRVTITCRASQDISNYLNWYQQKPGKVPKLLIYYTSRLHSGVPSRFSGSGSGTDFTLTISSLQPEDVATYYCVQYAQFPLTFGCGTKVEIKGGGGQEVQLVESGGGLVQPGGSLKLSCAASGFTFNKYAMNWVRQAPGKGMEWVARIRSKYNNYATYYADAVKDRFTISRDDSKNTLYLQMNNLKTEDTAVYYCVRAGNFGSSYISYFAYWGQGTLVTVSSASTKGPSVFPLAPSSKSTSGGTAALGCLVKDYFPEPVTVSWNSGALTSGVHTFPAVLQSSGLYSLESVVTVPSSSLGTQTYICNVNHKPSNTKVDKKVEPKSCGGGGCPPCPAPELLGGPSVFLFPPKPKDTLMISRTPEVTCVVVDVSHEEPEVKFNWYVDGVEVHNAKTKPCEEQYGSTYRCVSVLTVLHQDWLNGKEYKCKVSNKALPAPIEKTISKAKGQPREPQVYTLPPSREEMTKNQVSLTCLVKGFYPSDIAVEWESNGQPENNYKTTPPVLDSDGSFFLYSKLTVDKSRWQQGNVFSCSVMHEALHNHYTQKSLSLSPGKGGGGQGGGGQGGGGQGGGGQGGGGQGGGGQCPPCPAPELLGGPSVFLFPPKPKDTLMISRTPEVTCVVVDVSHEEPEVKFNWYVDGVEVHNAKTKPCEEQYGSTYRCVSVLTVLHQDWLNGKEYKCKVSNKALPAPIEKTISKAKGQPREPQVYTLPPSREEMTKNQVSLTCLVKGFYPSDIAVEWESNGQPENNYKTTPPVLDSDGSFFLYSKLTVDKSRWQQGNVFSCSVMHEALHNHYTQKSLSLSPGKGGGGQVQLQESGPGLVKPSETLSLTCTVSGGSISSSSYFWGWIRQPPGKCLEWIGNIYYSGSSNYNPSLKSRVTISVDTSKNQFSLKLSSVTAADTAVYYCARLPRGDRDAFDIWGQGTMVTVSSGGGGQGGGGQGGGGQEIVMTQSPSSLSASVGDRVTITCRASQGISNYLAWYQQKPGKVPKLLIYAASTLQSGVPSRFSGSGSGTDFTLTISSLQPEDFATYYCQQSYSTPFTFGCGTKVEIKGGGGQEVQLVESGGGLVQPGGSLKLSCAASGFTFNKYAMNWVRQAPGKGMEWVARIRSKYNNYATYYADAVKDRFTISRDDSKNTLYLQMNNLKTEDTAVYYCVRAGNFGSSYISYFAYWGQGTLVTVSSASTKGPSVFPLAPSSKSTSGGTAALGCLVKDYFPEPVTVSWNSGALTSGVHTFPAVLQSSGLYSLESVVTVPSSSLGTQTYICNVNHKPSNTKVDKKVEPKSC

SEQ ID NO: 1277 - protein, 983 aa, Synthetic construct
EVQLVESGGGLVQPGGSLKLSCAASGFTFNKYAMNWVRQAPGKGMEWVARIRSKYNNYATYYADAVKDRFTISRDDSKNTLYLQMNNLKTEDTAVYYCVRAGNFGSSYISYFAYWGQGTLVTVSSGGGGQGGGGQGGGGQQTVVTQEPSLTVSPGGTVTITCGSSTGAVTSGNYPNWIQKKPGQAPRGLIGGTKFLAPGTPARFSGSLEGGKAALTLSGVQPEDEAEYYCVLYYSNRWVFGSGTKLTVLGGGGGDKTHTCPPCPAPELLGGPSVFLFPPKPKDTLMISRTPEVTCVVVDVSHEDPEVKFNWYVDGVEVHNAKTKPCEEQYGSTYRCVSVLTVLHQDWLNGKEYKCKVSNKALPAPIEKTISKAKGQPREPQVYTLPPSRKEMTKNQVSLTCLVKGFYPSDIAVEWESNGQPENNYKTTPPVLKSDGSFFLYSKLTVDKSRWQQGNVFSCSVMHEALHNHYTQKSLSLSPGKGGGGQVQLQESGPGLVKPSETLSLTCTVSGGSISSSSYFWGWIRQPPGKCLEWIGNIYYSGSSNYNPSLKSRVTISVDTSKNQFSLKLSSVTAADTAVYYCARLPRGDRDAFDIWGQGTMVTVSSGGGGQGGGGQGGGGQEIVMTQSPSSLSASVGDRVTITCRASQGISNYLAWYQQKPGKVPKLLIYAASTLQSGVPSRFSGSGSGTDFTLTISSLQPEDFATYYCQQSYSTPFTFGCGTKVEIKSGGGGQEVQLVESGGGLVQPGGSLKLSCAASGFTFNKYAMNWVRQAPGKGMEWVARIRSKYNNYATYYADAVKDRFTISRDDSKNTLYLQMNNLKTEDTAVYYCVRAGNFGSSYISYFAYWGQGTLVTVSSGGGGQGGGGQGGGGQQTVVTQEPSLTVSPGGTVTITCGSSTGAVTSGNYPNWIQKKPGQAPRGLIGGTKFLAPGTPARFSGSLEGGKAALTLSGVQPEDEAEYYCVLYYSNRWVFGSGTKLTVL

SEQ ID NO: 1278 - protein, 720 aa, Synthetic construct
EVQLVESGGGLVQPGGSLKLSCAASGFTFNKYAMNWVRQAPGKGMEWVARIRSKYNNYATYYADAVKDRFTISRDDSKNTLYLQMNNLKTEDTAVYYCVRAGNFGSSYISYFAYWGQGTLVTVSSGGGGQGGGGQGGGGQQTVVTQEPSLTVSPGGTVTITCGSSTGAVTSGNYPNWIQKKPGQAPRGLIGGTKFLAPGTPARFSGSLEGGKAALTLSGVQPEDEAEYYCVLYYSNRWVFGSGTKLTVLGGGGGDKTHTCPPCPAPELLGGPSVFLFPPKPKDTLMISRTPEVTCVVVDVSHEDPEVKFNWYVDGVEVHNAKTKPCEEQYGSTYRCVSVLTVLHQDWLNGKEYKCKVSNKALPAPIEKTISKAKGQPREPQVYTLPPSRKEMTKNQVSLTCLVKGFYPSDIAVEWESNGQPENNYKTTPPVLKSDGSFFLYSKLTVDKSRWQQGNVFSCSVMHEALHNHYTQKSLSLSPGKGGGGQGGGGQGGGGQQVQLQESGPGLVKPSETLSLTCTVSGGSISSSSYFWGWIRQPPGKCLEWIGNIYYSGSSNYNPSLKSRVTISVDTSKNQFSLKLSSVTAADTAVYYCARLPRGDRDAFDIWGQGTMVTVSSASTKGPSVFPLAPSSKSTSGGTAALGCLVKDYFPEPVTVSWNSGALTSGVHTFPAVLQSSGLYSLESVVTVPSSSLGTQTYICNVNHKPSNTKVDKKVEPKSC

SEQ ID NO: 1279 - protein, 686 aa, Synthetic construct
QVQLVQSGAEVKKPGASVKVSCKASGYTFTNYWMNWVRQAPGQCLEWMGNIAYGVAGTNYNQKFQGRVTMTVDTSSSTAYMELSRLRSDDTAVYYCATRYFYVMDYWGQGTLVTVSSASTKGPSVFPLAPSSKSTSGGTAALGCLVKDYFPEPVTVSWNSGALTSGVHTFPAVLQSSGLYSLKSVVTVPSSSLGTQTYICNVNHKPSNTKVDKKVEPKSCDKTHTCPPCPAPELLGGPSVFLFPPKPKDTLMISRTPEVTCVVVDVSHEDPEVKFNWYVDGVEVHNAKTKPCEEQYGSTYRCVSVLTVLHQDWLNGKEYKCKVSNKALPAPIEKTISKAKGQPREPQVYTLPPSREEMTKNQVSLTCLVKGFYPSDIAVEWESNGQPENNYDTTPPVLDSDGSFFLYSDLTVDKSRWQQGNVFSCSVMHEALHNHYTQDSLSLSPGKGGGGQGGGGQGGGGQQVQLQESGPGLVKPSETLSLTCTVSGGSISSSSYFWGWIRQPPGKCLEWIGNIYYSGSSNYNPSLKSRVTISVDTSKNQFSLKLSSVTAADTAVYYCARLPRGDRDAFDIWGQGTMVTVSSASTKGPSVFPLAPSSKSTSGGTAALGCLVKDYFPEPVTVSWNSGALTSGVHTFPAVLQSSGLYSLESVVTVPSSSLGTQTYICNVNHKPSNTKVDKKVEPKSC

SEQ ID NO: 1280 - protein, 698 aa, Synthetic construct
EVQLVESGGGLVQPGGSLKLSCAASGFTFNKYAMNWVRQAPGKGMEWVARIRSKYNNYATYYADAVKDRFTISRDDSKNTLYLQMNNLKTEDTAVYYCVRAGNFGSSYISYFAYWGQGTLVTVSSASTKGPSVFPLAPSSKSTSGGTAALGCLVKDYFPEPVTVSWNSGALTSGVHTFPAVLQSSGLYSLESVVTVPSSSLGTQTYICNVNHKPSNTKVDKKVEPKSCDKTHTCPPCPAPELLGGPSVFLFPPKPKDTLMISRTPEVTCVVVDVSHEDPEVKFNWYVDGVEVHNAKTKPCEEQYGSTYRCVSVLTVLHQDWLNGKEYKCKVSNKALPAPIEKTISKAKGQPREPQVYTLPPSRKEMTKNQVSLTCLVKGFYPSDIAVEWESNGQPENNYKTTPPVLKSDGSFFLYSKLTVDKSRWQQGNVFSCSVMHEALHNHYTQKSLSLSPGKGGGGQGGGGQGGGGQEVQLVESGGGLVQPGGSLKLSCAASGFTFNKYAMNWVRQAPGKGMEWVARIRSKYNNYATYYADAVKDRFTISRDDSKNTLYLQMNNLKTEDTAVYYCVRAGNFGSSYISYFAYWGQGTLVTVSSASTKGPSVFPLAPSSKSTSGGTAALGCLVKDYFPEPVTVSWNSGALTSGVHTFPAVLQSSGLYSLESVVTVPSSSLGTQTYICNVNHKPSNTKVDKKVEPKSC

SEQ ID NO: 1281 - protein, 681 aa, Synthetic construct
QVQLVQSGAEVKKPGASVKVSCKASGYTFTNYWMNWVRQAPGQCLEWMGNIAYGVAGTNYNQKFQGRVTMTVDTSSSTAYMELSRLRSDDTAVYYCATRYFYVMDYWGQGTLVTVSSASTKGPSVFPLAPSSKSTSGGTAALGCLVKDYFPEPVTVSWNSGALTSGVHTFPAVLQSSGLYSLKSVVTVPSSSLGTQTYICNVNHKPSNTKVDKKVEPKSCSGGGGQEVQLVESGGGLVQPGGSLKLSCAASGFTFNKYAMNWVRQAPGKGMEWVARIRSKYNNYATYYADAVKDRFTISRDDSKNTLYLQMNNLKTEDTAVYYCVRAGNFGSSYISYFAYWGQGTLVTVSSASTKGPSVFPLAPSSKSTSGGTAALGCLVKDYFPEPVTVSWNSGALTSGVHTFPAVLQSSGLYSLESVVTVPSSSLGTQTYICNVNHKPSNTKVDKKVEPKSCDKTHTCPPCPAPELLGGPSVFLFPPKPKDTLMISRTPEVTCVVVDVSHEDPEVKFNWYVDGVEVHNAKTKPCEEQYGSTYRCVSVLTVLHQDWLNGKEYKCKVSNKALPAPIEKTISKAKGQPREPQVYTLPPSREEMTKNQVSLTCLVKGFYPSDIAVEWESNGQPENNYDTTPPVLDSDGSFFLYSDLTVDKSRWQQGNVFSCSVMHEALHNHYTQDSLSLSPGK

SEQ ID NO: 1282 - protein, 448 aa, Synthetic construct
EIVMTQSPSSLSASVGDRVTITCRASQGISNYLAWYQQKPGKVPKLLIYAASTLQSGVPSRFSGSGSGTDFTLTISSLQPEDFATYYCQQSYSTPFTFGCGTKVEIKRTVAAPSVFIFPPSDEQLKSGTASVVCLLNNFYPREAKVQWKVDNALQSGNSQESVTEQDSKDSTYSLKSTLTLSKADYEKHKVYACEVTHQGLSSPVTKSFNRGECSGGGGQEVQLVESGGGLVQPGGSLKLSCAASGFTFNKYAMNWVRQAPGKGMEWVARIRSKYNNYATYYADAVKDRFTISRDDSKNTLYLQMNNLKTEDTAVYYCVRAGNFGSSYISYFAYWGQGTLVTVSSASTKGPSVFPLAPSSKSTSGGTAALGCLVKDYFPEPVTVSWNSGALTSGVHTFPAVLQSSGLYSLESVVTVPSSSLGTQTYICNVNHKPSNTKVDKKVEPKSC

SEQ ID NO: 1283 - protein, 1160 aa, Synthetic construct
QVQLVQSGAEVKKPGASVKVSCKASGYTFTNYWMNWVRQAPGQCLEWMGNIAYGVAGTNYNQKFQGRVTMTVDTSSSTAYMELSRLRSDDTAVYYCATRYFYVMDYWGQGTLVTVSSASTKGPSVFPLAPSSKSTSGGTAALGCLVKDYFPEPVTVSWNSGALTSGVHTFPAVLQSSGLYSLKSVVTVPSSSLGTQTYICNVNHKPSNTKVDKKVEPKSCSGGGGQEVQLVESGGGLVQPGGSLKLSCAASGFTFNKYAMNWVRQAPGKGMEWVARIRSKYNNYATYYADAVKDRFTISRDDSKNTLYLQMNNLKTEDTAVYYCVRAGNFGSSYISYFAYWGQGTLVTVSSASTKGPSVFPLAPSSKSTSGGTAALGCLVKDYFPEPVTVSWNSGALTSGVHTFPAVLQSSGLYSLESVVTVPSSSLGTQTYICNVNHKPSNTKVDKKVEPKSCGGGGCPPCPAPELLGGPSVFLFPPKPKDTLMISRTPEVTCVVVDVSHEEPEVKFNWYVDGVEVHNAKTKPCEEQYGSTYRCVSVLTVLHQDWLNGKEYKCKVSNKALPAPIEKTISKAKGQPREPQVYTLPPSREEMTKNQVSLTCLVKGFYPSDIAVEWESNGQPENNYKTTPPVLDSDGSFFLYSKLTVDKSRWQQGNVFSCSVMHEALHNHYTQKSLSLSPGKGGGGQGGGGQGGGGQGGGGQGGGGQGGGGQCPPCPAPELLGGPSVFLFPPKPKDTLMISRTPEVTCVVVDVSHEEPEVKFNWYVDGVEVHNAKTKPCEEQYGSTYRCVSVLTVLHQDWLNGKEYKCKVSNKALPAPIEKTISKAKGQPREPQVYTLPPSREEMTKNQVSLTCLVKGFYPSDIAVEWESNGQPENNYKTTPPVLDSDGSFFLYSKLTVDKSRWQQGNVFSCSVMHEALHNHYTQKSLSLSPGKGGGGQVQLQESGPGLVKPSETLSLTCTVSGGSISSSSYFWGWIRQPPGKCLEWIGNIYYSGSSNYNPSLKSRVTISVDTSKNQFSLKLSSVTAADTAVYYCARLPRGDRDAFDIWGQGTMVTVSSASTKGPSVFPLAPSSKSTSGGTAALGCLVKDYFPEPVTVSWNSGALTSGVHTFPAVLQSSGLYSLESVVTVPSSSLGTQTYICNVNHKPSNTKVDKKVEPKSC

SEQ ID NO: 1284 - protein, 994 aa, Synthetic construct; identical to SEQ ID NO: 411

SEQ ID NO: 1285 - protein, 982 aa, Synthetic construct; identical to SEQ ID NO: 417
